United States Patent Application Publication US 2018/0148762 A1 - sequence listing, part 3

SEQ ID NO: 1 - DNA, 4988504 bp, Shigella sonnei 53G (residues 3,325,671-4,988,504 of 4,988,504)
gaaccggtggtgtatgttgctggtgcgccagatactctggaagacgataacagccatgcagcccagcgcggcgagcatatgatcatcaacttcccgatcggttctcgccctcgcaaaaatatcgccgccagtattcatggtcatattggcgatatggacaaaggctttgccgatgccgatgtgatcattgagcgaacctataactcaacgcaggcacagcagtgcccgactgaaacacatatctgctttacccggatggacggcgatcgtctggttatccacgcctccacccaggtaccatggcacttacgccgccaggtcgcgcgcctcgtgggcatgaaacagcataaagttcatgtcattaaagagcgagttggcggcggttttggttccaaacaggacatcctgctggaagaagtgtgcgcctgggcaacctgcgtgaccgggcgtccggtactattccgctacacccgtgaagaagagtttattgctaacacctctcgtcacgtcgcgaaagtcaccgtcaaactgggagcgaaaaaagatggtcgcctgacggcagtgaagatggatttccgcgccaacactggcccttacggcaaccactcactcaccgtaccgtgtaacggaccggcgctgtcgctgccgttatatccgtgcgataacgtcgatttccaggtcaccacctactacagcaacatttgcccaaatggtgcttatcagggttatggcgcaccgaaaggtaacttcgctatcaccatggcattagcggaactggctgaacagttacagatcgaccaactggaaattatcgaacgtaaccgggtacacgaagggcaagagctgaaaattctcggtgcaatcggtgaaggtaaagcgccgacctccgttccttccgccgccagctgtgcactggaagagatcctgcgtcagggtcgcgagatgatccaatggtcgtcaccgaaaccgcaaaatggtgactggcacatcggtcgcggcgtcgccattatcatgcagaaatcgggtatcccggatatcgatcaggctaactgcatgatcaaactggaatcggacggcacctttatcgttcattctggcggtgcggatattggtactggtctggatactgtagtgacgaaactggcagcagaagtgctgcactgcccaccgcaggacgtgcatgttatctccggtgataccgatcatgcgttgtttgataaaggcgcatatgcctcgtccggtacttgcttctcgggtaacgcggcgcgtttggcagcggaaaatctacgggagaaaattctgttccacggcgcgcaaatgttaggtgaggcagtggcagatgttcaactggcaacgccgggcgtcgtgcgcggcaagaaaggcgaagttagtttcggggatattgcccataaaggcgaaaccggcatcggctttggttcactggtgggaactggcagttatatcacgcctgatttcgccttcccgtatggcgcaaacttcgctgaagttgccgtcaacacgcgtacgggtgaaatccgcctggataaattctacgccttgctggactgcggtacaccggtcaacccggaattagcattgggacaaatctacggtgctaccctgcgagctatcggccacagtatgagcgaagagatcatttatgacgccgaaggtcacccgttaacgcgtgatttacgcagttacggcgcaccgaaaattggtgacattccgcgtgatttccgcgctgtgctggtgccgagcgacgataaagtcggcccgttcggggcgaaatcgatctcggaaatcggtgtaaatggcgcagctccggcgattgctaccgcaattcacgatgcatgcggcatctgggcagaagaaagtcaaagtgggcatgggaacggatatcggtgccggaacaactttcaacatgctgcaaacgctgaacgaagcctacaaagtgttgcaattacaaggctatcgcctctcggcatatgaagcgttttacctggccacgctcggcggagcgaaatctctgggccttgacgatttgattggcaactttttacctggcaaagaggctgatttcgtggtgatggaacccaccgccactccgctacagcagctgcgctatgacaactctgtttctttagtcgacaaattgttcgtgatgatgacgttgggcgatgaccgttcgatctaccgcacctacgttgatggtcgtctggtgtacgaacgcaactaataataaaactttaacatcctcgtgaggacatcattatgtctggagacatcctacaaacaccggacgcaccaaagccacagggcgcgctggataattattttaaaattaccgctcgtggcagtaccgttcgtcaggaagtactggctggcttaacgacctttctggccatggtttattccgttatcgtcgttccgggaatgctgggcaaagcaggttttcctcccgcagctgtgtttgttgccacctgtctggtcgcgggcttcggctcgttgctgatggggttgtaggccaatttgccaatggcgattggttgtgcgatttccttgacggcatttaccgcattcagtctggtactcgggcaacaaattagcgttcctgtcgcactggtcgcattttacgcgggtggttgggcaatctaatagattctccgcgcctttcagcgcggagatttctttcacagaggattctcaccgctggcaacaatacgctgctggcggactcgcctgagttctctttcagtaagcaactgcagcgcctgtgtcgggcaagattcaacacaggctggcccctcttcccgctgttcacagagatcgcatttcacaatttgttgtcgggtatcccccggcaacgactgaatggtgatcattccaaacgggcacgcactgacgcaactctgacagccaatacaacgggcagaattggtctgcaccacctgctcgcccatcgtcagcgcccccacggggcaagcgccaacacaaggggcgttttcacactgatggcacatcaccggcgcactgatgctgtccagtcgctgtaccttcagccggggtaaaaagacatcggcattcaactcctgttctgaagggtgagcgaccacacaggctacttcacaagtacggcagccaatacagtcagccggattaacgataattaacgatttcatcacgatgccttcgtatcaaacagagttaacatatcgcgcgccgcctgccttcctgcggccattgcagtgacaaccagatccgcgccatgaactgcatcaccaccagcaaagacttttttcagatgcgtctgggtaggtaaatacccgacgtcaccggtttgaatcaggccccatttatcgagtttaattccgctgccctgcaaccacggcatggcatgcgcctggaaaccaaaggccataatcagaacatcggcgggcaattcaaactctgaacccgctaccggacgaggacgacggcgaccatccggccccggctcacccatggcggtacgaatcaggcccaccgcagttaaacgcccatcttcgtcacaagcgatatattgcggttgaacattgaactgaaactcgacaccttcctcgcgcgcattaaccacctctttgcgcgagcccggcatactgacttcatcacgacgatacgcgcaggtcacgctggcagcattgaggcgaatggaagtccgcaaacaatccattgtcgtatcgccaccgcccaataccacgactcgcttaccttccacgtccgtcagcggatactcttcagactccggcaatcccatgagctggcgggtatgggcagtcaggaacggtagagcctgaatgacaccgggcgcatcttcatgcggcagatctgctcgcatcatcccgtaagtccccacgccgatgaaaactgcatcatattcagaagttaaatcgctaaaggtaatatcgcggccaatttcacagttaagatgaaagtcgattcccattgcggtgaatatctctcgccgctggcttaataccgttttatcgagtttgaaaggaggaatgccaaaagtcagcataccgccaatttctggatggcgatcaaagacatcaacctgaactcccgcgcgcgccagaatatcagcacaccctaaccctgctggcccagcgccaatcaccgccactttttcgatacggggaacaactttgctgacatcgggacgccagcccatcgccagcgcggtatcggtgatgtagcgttccagattaccgatagagactgcgccagagtgatctttcaaagtacatgcgccttcacaaagacggtcctgtgggcataccctgccgcagatttctggtaaggaactggtctggtggcaaagttctgccgcttcaataatctttccttcctgtaccagacggatgtaatccggaatagcgttatgcagcgggcaatgccagttgcagttagctttttcggcacaataaacacagcggtcactctcataagtcgcttgcagtggatccagcccgcaatagatttcgccaaagtgggttttccgttcactcgctgaaattttatctgcgcctttacgcgagttaacggggagcaacgctgcactgcgagatggctgagcgtctgatgacgcttttcctgctgccgttttgcgctggcgagccacctttatccactgtaaccctttatcgtccatcagtcgtaacgcctgtgttgggcagacttcaatacaggcttgcgtgccggaactgcgctggttacaaaggtcgcatttctgcgcaatcgtatcgaccatctcaacgacgccaaaggggcaagcgattgcgcatcttttacagccaatacatttttgctcgtccagttgtacgctatcggactggaaagtcagagcattaaccggacaagccgtaacacaaggggcattgttgcagtgatggcaggccaccggattcgcagcctggcctttccctacaacgtggatacgcggtcgaaagtcactgtgactcagcggccagttttcttgattgtgtgccaccgcacaggcaatttcacaagcatgacagcctatacattccgcagcttcagcagcgataaacttattcatttgcatccctttcatttaatgagttatgtcttctcaaatttcgcgatgcaataaacgggcatatattaggtagcatgaccgttttaattataattttgcgactgagttcaaattattgcccctcaatctatgccgctttcattatttcaacattgccgatcaaaagagcgctatccagataaaaacgattaaatgctagagtgcgacatgccagaatgattaatgaaatatcaatatgagaaaattacagataattccattgtcaggttctcttgtcattttcgtggtttaagcacgattatgtgattgcctccgcaattcctgtctctaactccccttcctcgcaaaaactggcactccacgagcatgtgtttagacagtttcattaacgtaaacggttgctttttactctggcgggcgaaaggagaaacactgatgagcgccatagattcccaacttccctcatcttctgggcaagaccgcccaactgatgaggttgaccgcatattatcaccaggaaagctgatcatactcggtctgcaacacgtccttgtcatgtacgcaggtgcagtcgctgttcctcttatgattggtgaccgactgggcctctcaaaagatgctattgcgatgctcattagctcggatctcttttgctgcgggatcgtcacattattgcaatgtatcggtatcggccgctttatggggatccgcctgccggtgattatgtcggtgacctttgctgctgtaacaccaatgatagccattgggatgaacccggatatcggcctgctggggatatttggtgccactatcgccgcgggttttatcaccacattattagcgccatttattggtcgcttgatgcctttattcccgccactggttaccggtgtggttattacttctattgggcttagcatcattcaggtgggtattgactgggccgccggaggtaaagggaatccgcaatatggtaatcccgtttatttaggtatctcctttgctgtcttaatttttatcttgctcattactcgctatgcgaaaggatttatagccgctgggtgtgtatttcttcgggaattatattaatcctgtttggcatggtgccaaaaatggcggtgctggtcgcctccattccgcaatttgtgctgggcggtgctgggctggtgatgttcggcatggtactggcgacagggattcgaattctgtcgcgctgtaactacaccaccaaccgttacaacctctatattgtggcgatcagtctcggcgttggcatgactccgacgctctctcacgatttcttttctaagttaccggccgtactgcaaccgttgctgcatagcggcattatgctcgcaacccttagcgccgttgtgctgaatgtcttctttaatggctaccagcatcatgctgacctggtgaaggaatccgtctctgataaagatttaaaagtcaggacagtacgtatgtggcttctgatgcgcaagctgaagaaaaatgagcatggagaataatatgaattttttaatgcgcgttatattcagtctgctgttgctttttactctctctattcctgtcatttctgactgtgttgcaatggccattgaaagtcgcttcaaatatatgatgctacttttttaaatggtttttacctgtcggcatccgctcaaaacgggcggttgtcgataaacgctcacttggttaatcatttcactcttcaattatctataatgatgagtgatcagaattacatgtgagaaattatgcaaacggaacacgtcattttattgaatgcacagggagttcccacgggtacgctggaaaagtatgccgcacacacggcagacacccgcttacatctcgcgttctccagttggctgtttaatgccaaaggacaattattagttacccgccgcgcactgagcaaaaaagcgtggcctggcgtgtggactaactcggtttgtgggcacccacaactgggagaaagcaacgaagacgcggtgatccgccgttgccgttatgagcttggcgtggaaattacgcctcctgaatctatctatcctgactttcgctatcgcgccaccgatccgaatggcattgtggaaaatgaagtgtgtccggtatttgccgcacgcaccaccagtgcgttacagatcaacgatgatgaagtgatggattatcaatggtgtgatttagcagatgtattacacggtattgatgccacaccgtgggcgttcagtccgtggatggtgatgcaggcagccaatagtgaagcaagaaaattgttgtctgctttcgcgcagcacaattaaaaaaccccgacatttgccggggttgtgagcataacgtaatgcttattttaccggacgcatcgccgggaacagaataacgtcgcggatggtatggctgttggtgaacagcattaccatacggtcgatgccaatccccagacctgctgtcggcggtaagccatgttccagtgcggtaacgtaatcttcatcgtagaacatcgcttcgtcgtcacctgcgtctttcgcggcaacctgatccaggaagcgttgcgcctgatcttccgcgtcattcagctcgctaaagccgttaccgatttcacgaccaccgatgaagaactcaaagcggtctgtgatttccgggttaatgtcgttacgacgcgccagcggagaaacttctgccggatattcagtaatgaaggtcggctgaatcagatgtgcttctgccacttcttcgaagatctcggtaacgatacggcccagaccccagctcttctcaacgtggataccgatagattcagcaatcgctttcgcagagtcgaagttatccagatccgccatgtcggtttccgggcgatatttcttgatcgcttcacgcatggtcagtttttcgaacggtttaccgaagtccagcgtcacgtcgccgtaggtcacttccgtcttaccgagaatatcctgtgccagagtacggaacagcgattcggtcagctcgatcagatctttgtaatctgcgtaagccatgtagagttccatcatggtgaactctgggttatgacgtacggaaataccttcgttacggaagttacggttgatttcgaatacacgctcgaagccaccgaccaccagacgcttgaggtacagttccggcgcgatacgcaggtacatgtcgagatccagcgcgttatggtgggtgataaacggacgcgcagcggcaccgcctgggatcacctgcatcatcggcgtttcaacttccataaagccgcggttcaccatgaactggcgaataccagagaggatctgcgagcgtactttaaaggtgttacgggattcatcgttagagatgagatccagataacgctgacgatagcgcgcttcctgatcctgcaagccgtggaatttatccggcagcggacgcagtgctttggtcagcagacgcagctcggtacagtggatagacagttcgccggttttggttttgaacagtttacctttcgcgccgaggatgtcgccgaggtcccattttttgaactgctcgttgtaaacgccttccggcagatcgtcacgggcaacgtacagctgaatgcggccacccacatcctgcagggtaacgaaagacgctttacccataatacggcgggtcatcatgcggccagcaacggcgacttcgatgttcagcgcttccagttcttcgttctctttaccgtcgaattctgcgtgcaattggtcagaggtatgatcgcgacggaaatcgttcgggaaggcaatcccctgctcgcgcaggttcgccagcttctcacgacgcgttttcagttcattgttaagatcgactaccgcgtcagcgccctgtgcgtgttgttcagacatgttggttcctcataaccctgctttcaaacttgcttcgataaattgatccaggctgccgtccagcacggcctgcgtgttgcgagtttctaccccggtacgcagatctttaatgcgggagtcatcaaggacataagaacgaatctggctgccccagccgatgtcagatttgttatcttccatcgcctgtttctcggcatttttcttctgcatctccagttcataaagcttcgctttcatctgcttcatggcctgatctttgttcttgtgctgggaacggtcgttctggcactgggtcacgatcccggtcgggatgtgggtaatacgcaccgcagattcggtacggttaacgtgctgaccgcccgcgccggacgcgcgataaacgtcaatgcgcagatccgccgggttgatttcgatatcaatatcatcatcaacttccggataaacaaacgcagagctgaacgacgtgtggcgacgaccgccggagtcaaacgggctcttacgcaccaggcggtgaacgccagtttctgtacgcagccagccgtaagcgtaatcgccggagattttgatcgtcacggatttaatacccgccacttcaccttccgactcttcgatgatttcagttttgaaaccacgcgattctgcccagcgcagatacatacgctcaagcatgctcgcccagtcctgtgcttccgtaccgccagaccccgcctgaatatcgaggtagcagtcggcgctgtcatattcgccagagaacatacggcggaactcaagctgcgccagtttttcttccagggcgtcgagttcagcaacggcttcgttaaaggtttcttcgtcgtcagcttctacagccagttccagcagaccagaaacatcttccagcccctgtttcatttggtcgagggtgtcgacaacggcttcgagggaggaacgctctttacccagcgcctgtgcgcgttcgggttcattccagacatccggctgttccagctcggcgtttacttcttccagacgctctttcttggcgtcgtagtcaaagataccccctaagaacgtcggagcgttccgtgaggtcctgaatgcgattatttaccggattaatttcaaacatggtctgatttcttttattgagctagtcaaaatgcggtgataagagcgggattgtacccaatccacgctcttttttatagagaagatgacgctaaattggccagatattgtcgatgataatttgcaggctgcggttgccgcgaaactcgttgatatcgagcttgtaagccagttgcacttcgcgcacgccgttatccggccagagggcggtatcgacattaaaagcaataccatccagcagcggaccgccgccgaccggttcgaccatgactttcaaatgacgttcgcccaccagccgctgttgcagcagccggaaatgaccgtcaaacagcggctccgggaacatctgcccccacgggccagcatcgcgcagcagctgcgccacttccatggtcatttcggccgggcttaacggaccgtctgacaccacttcgccttgcaatagcgaagggtccagccactcagtaaccagttcgccaaaccgttgttgaaagagttcgaatttatccgcttccagcgacaaacccgccgccatcgcatgaccgccaaacttcagcatcatgccagggtagagtgtgtctaatcgctccagcgcatcacgcatatgcagcccctgaatggagcgaccagaacctttcagcgtaccatcacccgcgggcgcaaaggcgataaccggacggtgaaaacgctctttaatacgggaagccagaataccgacaaccccctgatgccattcggggtgatacattgccagcccgccgggtagcgtgtcacggctgcgctccagtttctcgcacagggtcagggcttcaacctgcattccttgttcgatctcttttcgcgtctggtttagcgcatcgagttcatttgccagcacgcgcgcttcgccgatgttgtcgcacagcaagagcgccacaccgacggacatatcgtccagtcgtccggcagcattgagacgtggccccagcgcaaaacctaaatcgctggcggcgagtttttgtgcatcacggtttgccacttcaagcagcgctttaatccccggacggcactttccggcacggatgcgactcatcccctgccaggtcagaatgcgattattagcgtccagcggtacgacgtccgccactgtccccagcgctaccagatccagcagttctgccaggttaggaattgcgatgccgcgctcatcaaaccagccctgatcgcgcaaaaaggtgcgcagcgccagcatcagataaaacgccacacccacgcctgccagtgatttcgacgggaaattacagtcgcgcaagttagggttaatgatcgcttccgccgcgggtaatgtttcgcccggcaaatggtgatcggtaacaataaccggaatgcccaacgagcgagcgtgttcaacccccgcatgggaggaaataccgttatccaccgtgacaattaactgcgcaccacgggcatgggcctgatcgaccacttccgggcttaagccgtaaccgtcttcgaaacggtttggaaccaggtagtcgatattgctgcaaccaagcgagcgcatcgccagcacgcttagagccgtgctggtggcaccgtcggcgtcgaaatcaccgaccacaataatccgcgttccttcgcgaaaggcgttgtaaaggatctcaacggccttttcgacgccgctcagttgctgccagggcagcatccctttaacactgcgttccagttcttgcgcactgcgcacgccccggctggcgtataaacggcgcagcaagggaggcaattcagcgggcaagtctgccgtttcatcgactgcacggcgacgaagttgtatctgttgtttcacgcgaattatttaccgctggtcattttttggtgttcgtcgaggaattctttcatctctttcggcggctggtaacccggaacaagtgtgccattgctcagcacaactgccggagtaccgctaacgccaagctggacgccaagtgcgtaatggtcggcaatatccacgtcgcagctggctggtgcgacgcttttacctgccatcacatcatcaaacgctttgtttttatctttcgcacaccagatagctttcatttctttctctgcatcgctgtccagcccctggcgcgggaaagcaagataacgcacggtgatccccagcgcgttatagtctgccatttgctcatgcagtttgtggcagtaaccacaggtaatatcagtaaacacggtgatgacgtgtttttcctgcagcgctttataaacgatcatctctttttcaagcgcattcaactgctttaacagcatcttattggtgacattgaccggagccgtgccgctaacgtcatacattggcccctgaatgatatgtttaccatcatcggtgatgtacaacacgccgctgttagtcagaactgtcttcatgccagctacgggcgcgggctgaatatcgctgcttttgatgcccattttggctaacgtttgttgaattgccgcgtcatcagcctgagcaaaacctgaaaacgccgctaacaaagtaaacaacataaaacctttcttcataaatcttcccgttcttttcagacatcacgcccgcgggtgatgctgttgatgaagttgccgcagacgctcggtagcgacatgcgtataaatttgcgtggtggaaagatcgctgtggcccagtagcatctgcaccacgcgtaaatccgcaccatgatttaataaatgagtggcaaaagcgtgacgcaacacatgcggtgacagcttttcgctgtcgatacccgccagcacggcataatgtttaatgcggtgccagaaggtctgtcgcgtcatctgctgcgcacgctggctgggaaacaacacgtcaattgacacaccattcagcagccacggacgcccatgttccagataggtttccagccagtaaaccgcctcttcacctaacggtaccaggcgctctttgttgcctttaccaatgacccgcactacgccctgacgcaggctgatatcactcattgtcagcccgaccagttcagagacacgcagcccggtagcatacaacacttcaagcatggctttatcgcgtagctccagtggctgatcaattaatggcgcctgtaataaacgttcgacctgcgcttcgcttaaatcttttggcaaacgctggggcaatttcggtgaagcgagatgcgcactgggatcgtcttcacgaaacttttcgcgataaagatactggaacaatcggcgcactgcactcagcaaacgcgctgagctggtggctttatacccgccctccagccgttctgccagtaatgcctgcaaatcgtcactttgcgccgtcgccagcgtcaacccgcggtgatgcaaccactccaccatcattgacagatcgcgacggtaagcgttcaacgtattttcagccagatttttttccagccacagagcatcaagaaactgctcgatgcgtgccagatcctgtttcacttgcgccccttatggtcactcatttgatccattatgccttattgtgccgtgactaaagcgattctgatacactagctgcaaaagccacagcagaatcgagaagcttacgttatgaatatgggtcttttttacggttccagcacctgttacaccgaaatggcggcagaaaaaatccgcgatattatcggcccagaactggtgaccttacataacctcaaggacgactccccgaaattaatggagcagtacgatgtgctcattctgggtatcccgacctgggattttggtgaaatccaggaagactgggaagccgtctgggatcagctcgacgacctgaaccttgaaggtaaaattgttgcgctgtatgggcttggcgatcaactgggatacggcgagtggttcctcgatgcgctcggtatgctgcatgacaaactctcgaccaaaggcgtgaagttcgtcggctactggccaacggaaggatatgaatttaccagcccgaaaccggtgattgctgacgggcaactgttcgtgggtctggcgctggatgaaactaaccagtatgaccttagcgacgagcgtattcagagctggtgcgagcaaatcctcaacgaaatggcagagcattacgcctgatctcactgacggcttagcgcatatgctttgccgtcatctttatctttgcgtctcttgttgcaacaaaatccgccgtaaatcccgccattcggcttcgtccatgctgtcggctgccagccataaatgttgccgtttaccgccatcagaacgtaaacgcagcatcatgccgctcttaatcatccacggtgctttgacgatgctccactcctgcccttgccaacgcaaacgcccgtccatcaacaagcgaatttccccctggcgagcattaatacgccgctggctgcgaacgcaatcaaacaccaccagcgaaagtaacaccatccataacggggtgtaactgagtggccagggcatgagtaaaataacagcggcaaccagcccatgaatcagcaaggaaagccactgtgcgcgccaggagacgcgcaaatcagattgccacaggaccacgttcccggttccgtgtctggatgagtcggaccatcatttccagttctgcatcggccggtttaccgtgattcatcagccagttaaacaggtccggatcgtcacattccagcagacgaataaagatgcgtttttcgtcatcgcttaagctgtcgtactcatgttcgaaaaacggcatgattgaaatatcgagttcgcgcataccacggcggcatgcccaatgaatgcgggctttgttgttaatgtccatcttcttcctgtctcacgaaaatccagtaccccgctattgtaacgtgtttttcgccttcttttacgggaatatcagtaaacaccatcgcgatcacaaaattaattcacaacaattcaatggcttcatttttttggaagtcgcctcgcagaaggcacagatcgcgtagtgaaagcacttgcattgcctcatagctcttttaccattagtcattaatacgccgttaagcaactcaggactctattatggcttttacaccttttcctccccgtcagcctacggcttctgcccgtttaccgctgacgctgatgacgcttgatgactgggcgcttgccaccattactggcgcggacagcgaaaaatatatgcagggtcaggtgacagcagatgtcagccagatggcagaagatcagcacctgctcgccgcccattgcgacgccaaaggcaaaatgtggagcaatttacgtctgttccgcgacggcgatggctttgcgtggattgaacggcgcagcgtgcgtgaaccgcagctgactgaactgaaaaaatatgcggtgttctctaaagtgaccatcgcgccagacgacgagcatgtgctgcttggtgttgccggttttcaggcgcgcgccgcgctggcaaatatctttagtgaactgccttcgaaagaaaaacaggtagttaaagaaggcgcgaccactttgctatggtttgaatacccggcagaacgtttcctgatcgtaaccgatgaagctactgctaatatgctgaccgataaactgcgcggtgaagcggaactgaacaatagccaacagtggctggcattaaacattgaagcgggtttcccggtgattgatgccgccaacagcgggcagtttatcccacaggcgaccaatctccaggcgctgggcggtatcagctttaagaaaggctgttataccggacaagagatggtggcgcgagcaaaattccgtggtgccaataaacgtgcgctctggttgctggcaggtagcgccagccgactgccggaagctggtgaagacttagagctgaaaatgggcgagaactggcgtcgtaccggtacggtgctggctgcggtaaaactggaagatggtcaggtcgtggtacaggtcgtcatgaataacgatatggaaccggatagcatcttccgcgtacgcgacgatgcgaatacattgcatattgagccgctgccgtattcgctcgaagagtaaatctctttatcgcatcaggcatttatcgcctgatgcgacgctgacgcgtcttatcatgtctgggatttgatgcctttatcacaacagggacgaggcccgtagatcggataaggcgttcacgccgaatccggcagttgtgctccgatgcctgatgcgacgctgacgcgtcttttcaggcctacaaaggcatacccattacgcctgcccaatatacaaatagatcgccagaaagtggcacacactgccgccgagcacgaagccgtgccagatggcatgattgtagggaatgcgtttgcagacatagaaaatcactccgagcgaataaaccacgccgcctaccgccaataaggtaacgctgcccgccgcgagcttaactgccatttcataaattaccaccagcgacagccagcccatcgccagataggtcaccagagataaaattttgaatcggtgcgcgatggtcagtttaaacagaatacccagcaatgccaggctccagataacaatcatcaacccgcgcgctaacggagaatccagccccaccagcaaaaacggcgtgtaggttccggcaatcaacaggtaaatagcgcaatggtcaaatttcttcagccacatttttgcccgttgatgaggaatggcgtgatagagcgtcgaagcgaggaacagcaggatcatactgccgccatagaggctgtaactggttatcgctgtggcgctggcattgagatccaccgcctgaaccagtagcaacaccagcccaacgataccaaacaccaacccaatgccgtgactgacgctgttggcaatttcctctgccagcgaatatccctgcttaatgaggggcttctgaaccataacttactccggagaaacgtacacgcacatgtatacctctccagcgtaactgagaatagttccagtgaacacctgttagctaaaataaattctgatttgagactaatctcctaaaaatcatgaaattaaatgcgaaatttcaactaacaggcgtgagttcaatttaaagacatttaaattcaatcacataaaactgtgtctgaccgggatagatgtcggcaatgacctttatcagttcagtcagggtcatattttcctgctctgcatgtttttccgtcagcgtatccagcgttacggttgaggttgcggtgacttcaatcgtgcaaaaataaccgtcatcttcaaaacgcccgacacgaagcacatcacccgttttgaagtgcgattcagactcgtcgcggatggtgatggttttacgcccagccagaatgtcatcctggaaacgttgaaaaaaagtgatgtcgtttggctgcatggtactatttcctgtaagaattgactcatctggagcctatgatagtgaaaaaactcaccttacagaaagatttcttatggggcggcgcagttgccgctcatcaggtcgaaggcggctggaacaaaggcggcaaagggccgagcatttgtgacgttctgaccggtggcgcacacggcgtgccgcgcgaaatcaccaaagaagtcttgccaggcaaatactatccaaaccatgaagccgttgatttttatggtcactacaaggaagacatcaagctatttgccgaaatgggcttcaaatgttttcggacttccatagcctggacgcgcatttttccaaaaggcgatgaagctcagccaaacgaagaagggctgaagttctacgatgatatgttcgatgaactgctgaaatacaacatcgaaccggtgatcaccctctcccactttgaaatgccgctgcatctggtgcagcaatacggtagctggaccaaccgtaaagtggttgatttctttgtccgtttcgcggaagtggtgtttgaacgctataagcataaagtcaaatactggatgaccttcaacgaaattaacaaccagcgtaactggcgtgcaccgctgttcggttactgctgctccggcgtggtttataccgagcatgagaacccggaagagacgatgtatcaggtgctgcatcaccagtttgtcgccagcgccctggcggtgaaagctgcgcgtcgcattaacccggagatgaaagtcggctgtatgctggcgatggtgccgctctatccctactgctgtaacccggacgatgtgatgttcgctcaggagtcgatgcgcgaacgctacgtctttaccgatgtgcagctacgcggctattacccgtcctatgtgttgaacgagtgggagcgtcgcggatttaacatcaaaatggaagacggcgatctcgatgtactgcgcgaaggcacctgcgattatcttggtttcagctattacatgaccaacgcagtgaaggccgaaggcggcaccggcgatgcgatctctggtttcgaaggcagcgtaccgaacccgtatgttaaagcgtctgactggggctggcagattgatccagtaggtctgcgctatgccctttgcgaactgtatgagcgttatcagaggccgctgtttattgtcgaaaacggttttggcgcttacgacaaagtggaagaagatggcagcatcaacgacgactaccgcattgactacctgcgcgcccatatcgaagagatgaaaaaagcggtgacttacgatggcgtggatctgatgggctacacaccgtggggctgcatcgactgcgtatcgttcaccaccgggcagtacagcaaacgctacggctttatctatgtgaataaacatgacgacggtactggcgatatgtcgcgttcacgtaagaagagctttaactggtacaaagaggtgattaccagcaacggcgagaagctttaagtcgatgaagtaccggatgcaatacttgttgcatccggtcagacaacttccctgttttatttcccgcccgccaaatcgataaaacttcccgtgacgtaagaggctttatcacttagtagccagacaatggcctgcgcgacctcttctgcctgtccaccacgctgcatggggatgttcgacttaacgcgatcgacgcgtccaggctcgccgccgctggcgtgcatttcggtaaaaataaaccctggccgcacgcagttaacgcggaccccctgcgcggcgacttccagcgatagtccggtggttaacgtatcaatcgcccctttcgatgccgcgtaatcaacatattcccctggcgaacccaaccgtgaggccaccgaagagacattgacgatagcgccgccactgccaccatttttaagcgccatgcgttttaccgcctcgcggcagcagagaaaatatcccgtcatgttggtggaaagtactcggttgattcgctctgcggtaaggttttcaacggtgcactgggtaaacaagatcccggcgttattgaccagcgctgctagcggttcatcgtgctgatcgattgctgtaaacattgcgatgacctgattttcgtcgctgatatccgcctggagcacgaatgccttgccaccggcttgcgtgattaagttcaccacttcctgcgccgcatggagattttgttgataattaaccgccaccgtatactcttctttcgccaacagtaatgcagttgcccgcccgatgccgcgactgccatcggtcacaagtgctatagccatttgtttttccgagaaaaattaattcgttgacgtatctttgagattgctaacaaactggctcaatcttcaatgttggcacgcttttcccctcgccctttcagggagagggccggggtgagggtaaatattcgcgccagtgccggcctgttcccctcaccctaaccctctccccaaaggggcgaggggactgtctgagcacttttgtactttgtcatctgactaaaaaggcgccgaagcgcctttagaaaatagtcgaatcagtgaattactggtattcgctaatcggtacgcaggagcagaacaggttacggtcgccgtaaacatcatccagacgtttcaccgtcggccagtatttgtctgccacgcctgccgggaataccgcaacttcacggctgtacggatgcgcccactcggcgaccagttcgctctgaatgtgcggcgcgttcaccagcgggttatcttccagcggccagacagcggctttcacctggtcaatttctgcgcggatagccagcatcgcgtcgataaagcgatccagttccactttgctttcagattcagtcggttcaaccatcagcgtacccgccaccgggaacgacatcgtcggcgcgtggaaaccgtagtcgatcaggcgcttggcaatatccagctcgctgatgccggtttcttctttcagcgggcgaatatcgagaatacattcgtgcgccacgcgaccgtcgcgaccggtatacagcaccgggaaggcatcctgcaggcggctggcaatatagttggcgttgaggattgccacctggcttgcttttttcagcccttctgcgcccatcatgcggatgtacatccagctgattggcaggatagaggcgctaccgaacggtgccgcagaaactgcgccctgacgggttaacatgccttcgatttgcaccacgctatgacccggtacaaacggtgccagatgcgctttcacaccgatcggtcccatacccggaccaccaccgccgtgcggaatgcagaaagttttatgcaggttgaggtgcgaaacgtccgcgccaataaagcccggcgaggtgatgccaacctgggcgttcatgttcgcgccatcaaggtaaacctgaccgccgaactgatgcacgacttcacacacttcacggatcgtttcttcatacacgccgtgggtagaaggataagtcaccatgatacaggagaggttatcgcccgcctgttccgctttcgcgcgcagatcagtcagatcgatgttgccgtttttatcacacgccacaaccaccacctgcattcctgccatatgtgcagaagcggggttagttccgtgcgcagaagccgggatcaggcagatatcgcgatgcccttcgttgcggctttcatgataatgacgaatcgccagcaggcccgcgtattcgccctgtgcgccggagttcggctgcatacaaacggcgtcgtaaccggtcagtttcaccagccagtcagccagctgcgcaatcatctgctgataaccttcagcctgttccggcgggcaaaacgggtgcagttcggcaaattccggccaggtgattgggatcatctcggcggcggcgttcagtttcatggtgcaggaacccagcgggatcatcgcctgattcagcgccagatctttacgctccagcgagtgcatatagcgcatcatttcggtttcgctgtggtagcgattaaacaccggatgggtgaggatttcgtcgtcgcgcagcatcgcaggctggatagagcggctgtcgtgagccacgtctttgtccagcgtgtcgatctccagcccgtggttatcgcccagcagcacgctgaaaagctgcattacgttttcacgcgtggtggtttcatcaagggtgatccccacggcgttcaggatatcgctacgcaggttgatttcagccgcttcggcacgcgtcagtacgcccgctttgtcggccacttccacacacaaggtgtcgaaatagtgcgcatggcgcagtttcagacctttttgttgcaggcccgccgccagaatatcggtcagacggtgaatgcggttagcgatacgtttcaggccaaccgggccgtgataaacggcatacaggctggcgatgtttgccagcagtacctgggaagtacaaatgttggagttcgctttctcacgacgaatatgttgctcgcgagtctgcatcgccatgcgcagcgcggtattgccagctgcatctttcgatacaccgataatacggcccggcattgagcgtttgtattcatctttcgccgcaaagaatgccgcgtgtgggccaccgtagcccatcggcacgccgaagcgttgcgccgaaccaaaaacaatatccgcgccctgtttacccggcgcagttaacagcaccagcgccataatatcggcggcaacgctgaccacaattttgcgtgatttcagttcgctaataagcgcagtgtagtcgtgaatttcaccggtagtgcctacctgctgtaacagcacgccgaagacgtcctgatggtcgagcactttttgcgcgtcatcgacaatcacttcaaaaccaaaggtttcggcacgagtacggaccacatccagcgtttgcggatgcacatcggaagccacgaagaagcggttggcatttttcagtttgctgacgcgtttcgccatcgccattgcttcggcggcagcggtggcctcgtccagaagagaagcagaggccatatccagtccagtcaaatccagcgttacctgctggaagttgagcagtgcttcaaggcggccctgggagacttcaggttgatacggagtgtacgcggtataccagcccggattttccagcatgttacgcaggataaccggcggtagctgcacggcggtgtaacccatgccgatgtaagacgtgaagcgtttattgcgactggcaatagccttgagttctgccagtgcggcgtattcggtcgccggtgcgccaacctgcggcggggtcgcaagctgaatatctttcggtacaatctggccggtcagcgcgtttaacgattgtgcgccaacggcattcagcatttcttgctgttgcgcggcgtccggtccgatatggcgttcaataaaagcgccgctgttttcaagctggcttaacgtctgtgtcatgagcgatggttcctgaaacgtgcagtgaattgtgaacctctctccttacgaagagagtgagggtgaggcataaattttcctcaccctgatcctctcccgcagaagaggaataaagccgttactcgtcttctaacaatgcttcgtatgcggtcgcatccagcagtgattccagttcgctttcatcgctggctttgattttaaagatccagccacctgcatacggttcgctgttcaccagttccggggaatcgctcagtgcgtcgtttaccgccacgatttcaccgcttactggcgcataaatgtctgacgccgcttttactgattcggcaaccgcgcagtcatcgcccgcgctaaccgttgcgcccacttccggcaggtcaacaaacaccatatcgcctaacagctcctgagcatgttcggtaataccaacggtgtaagtgccgtcggcttctttacgcagccattcgtgttctttgctgtatttcagttctgctggtacgttgctcatcaatcaatctccaaaaaagtaaatcacgcgacggctttgccgttacgcacaaaaacaggttttgtcactttaaccgacatttcacggttgcgaatttgcacaatcgccgtttcgccaataccttccagcacgcgcgccagcgcaatgctgtaacccagcgtcggggagaaagtaccgctggtgataatgccttcatgctggttgccctgcgcatcggtaaagcgtaccggcagttcattacgcagcacgcctttttcggtcatcaccagaccaaccagtttttctgtaccatgctcacgctgcacttccagggcttcacgaccgataaagtcacgatctgccggttcccaggcgatagtccagcccatgttggcggctaaaggagaaatagtttcgtccatctcctgaccataaagattcatgcccgcttccagacgcagcgtgtcacgcgcgcccaagccacatggcttaacacccgcttccaccagcgcacgccagaaatcggccgctttttcattgggcagcgcaatttcatagcccgcttcaccggtataaccagtggtggcaataaacagatcgcccgcctgcacgccaaagaacggtttcatcccttccaccgcctgacgctgggcgtcattaaacagtgtggcagcttttgcctgcgcattcggcccttgcacggcaatcatggaaaggtcatcacgaacggtaatttcgatgccgaaaggttcagcgtgttgggtaatccaggagaggtctttttcgcgggtggcggagttaacaacgaggcggaagaaatcttcagtaaagtagtagacgatgaggtcatctatcacaccgccagaggcattcaacatccccgagtaaagggctttgccgcttttggtgagcttcgccacatcgttcgccagcagataacgcagaaactcccgggtgcggctgccgcggagatcgacgatggtcatatgtgacacatcaaacattccggcatcggtacgtaccgcatgatgttcgtcgatttgcgaaccgtaatgcagcggcatcatccagccgtggaaatccaccatgcgagcgccgcaaagcgtgtgttgttcgtacaaaggagtctgttgtgccatcttgtcctcattgaataagcggggctgacaacttttcatggtgaaattatcaccacgaaacccagcatcggagccactcccggtccccaacgcaatcgttctcttttgcctgaacttaccaccgaaacagactgttaaccataaggtaaaattgatcatcacattagcttatggttaaaaaacgccaaaatcgcgacagaataaaaaaccaaaaaacacaccagtttctatataaagatgatgccattagaaagctaatttgaataaggcaatattaagagctaaaaaaatgtcaaaaaacactaaatcaaaaaataatgacattagaaaatataatgcgaaaacggaggtgaaattagtttatttcaaatgaggaaaatctcccggcgaaaaaaccgggagatgaaagtgtgatgggtatcaaataaacagcagaagagaaatttttaacgcagccattcaggcaaatcgtttaatcccattgcctggcggataagttgtggtttaacgccaggaagcgtgtcggccagtttcaaaccaatatcacgcagcagttttttcgccggattggtaccggaaaacagatcgcggaatccctgcataccagccagcatcagcgccgcactgtgcttgcggctacgctcataccggcgcaggtaaatgtactgcccgatgtctttcccctgacgatgcaaccgtttcagttcagcaatcagctctgcagcatccataaagccaagatttactccctgccccgccagcgggtgaatggtatgcgcggcgtcgcccaccagcaccagacggtgcgcggcaaactggcgcgcataacgccccgtcagtgggaacacctgacgcgcgctctcaaccttgcataagcccaggcgattatcaaaagcgatatttaacgcgcgattaaattcatcttcacttgcctgctgcatccgctgcgcttcctctggcgacagtgaccagacaattgagcaaagatgcggatcgctaagcggtaaaaaggccagaatgccttcgccatggaaaacctgccgcgccaccgcatcatgcggttcttccgtgcgaatggtcgctaccagcgcgtgatgctgataatcccagaaagtcagcggaatatctgctttgttgcgcaaccaggaattagcaccgtccgcgccaatcaccagacgcgccgttaacatgctgccatctttcagcgtcaggaaagtttcattttctccccaggcgacctgctgtaattctgcgggggccaacagagtgatatctgacgactgctgcgctttgttccacagcgcgtagtgaatcactgagttttcaacgatatgcccaagatggctatagcccatgctttgatcgtcaaacgaaatgtgaccaaaactgtctttgtcccacacttccataccgtgataacaactggccctacgagagagaatgtcctgccagacgccaagacgggtgagtaatttttcgctggcggcattgatagccgaaacgcgcagttgtggtggtgcatccgccgccagaggttccggtacgcgctgctccagtacggcaacgcgtaagccgctcccctgtaagccgcaggcaaccgccagccccaccatgccgccaccaacaatggctacatcaacactttgcattgtttattccttaaaaccgccttcaacgcgccacccaaccgagggtgcgctgcgccagcacatcgcgtgccggggtgaataattccatcgtcatcagtccgatgttgcgcccgacaaccagcggtgcccaacggttggcaaaaagatgtaccaggctgtccgtgacgccgatggttgcttcgcgatcgctctgtcgacgctgctgatagcggcacaatatgccgtaatcaccgatgtcttctccgcgctcatgcgcctgagtcagggtttccgcaaggctcatgacatctcgcataccgaggttaaacccttgcccggcaatcgggtgcagagtttgcgccgcattgcccaccagcacggtacgatgggtaatagctctggcggcgcgggttaacgccagcggataagcactgcgtttaccggcgtgggtaatttttccaagtcgccagccaaaggccgactggagttcacggcaaaacttctcgtcgctccacgacagcacctcttcgcgccgttccagtggatgacaccagaccagcgaacagcgtccgtcagacatcggcaacatcgccagcgggccatgttgcgtgaagcgttcaaaagcgcggccttcgtgcgcaacggaagtcgcaacgttggcaatcacggccagttgttcgtaaggctcctgctgccagtcaacgccgcacgcggtggctaacgctgaatgggtgccatcagctgctaccagcacgcggcccgtcagcgtctcgccactctccagcgtcacttcaacgtgactctgagtacgggcaacgttagccacgcgatcagggcaatgcagcgttacgccaggtgctttacgcagcaatgcaaacagccgttgcccgacattgtgcaattcgacaacctgtcccagcgccgccagttggtaatcttctgcggcgagggtgacaaatccagcgtgaccacgatcgctgacatgcacggtagtgatggcggttgcgtaatccgccagagattgccagacgccgatgcgcgccagttgctgacaggtccccgcagccagcgcaatagctcgtccatcaaagcccggatgagcatgtgactctggcgcggtcgcttcaatcaaatgtaccggcagcgccccgtgacttaaccgggaaatagccagcgccagcgtcgcgcccgccatgccgccaccgacgatgattacgctcattgctttctcgcagctgccatcaacgcttcgatttcttccggctttttcaccacgctggcggtgaggttttcgttgccggtttcggtaatcacaatgtcgtcttcaatacgaatgccgataccgcgatattgttctggcacatccgcatccggcgcgatatacagaccaggctctacggtcagtaccatccccggttccagaatgcgcgagcgatcctgaccataaacgccaacgtcatggacatccagtcctaaccagtggctaaggccatgcataaagaaaggacgatgggcgttctgagcgatcagttcatcaacatcacctttcaggatgccgagttttaccaggccgctaaccatgatgcgcaccacttcaccagtgacttccagaatggaagttcccggacgatacaggcgcaggctggtttcgagagactccagcacaatgtcgtagatttcacgctgggcctgggtgaatttgccgttgaccgggaaggtgcgggtaatatcgcccgcgtaacctttgtattcacaacccgcgtcaatcaacaccaggtcaccgtcgcgcagttcactctcgttttcggtgtagtgcagaatgcagccgttttcaccgctgccgacaatggtgttataggacggatagcgcgcaccgtggcggttaaattcgtggtgaatttcgccttccagatggtactcgaacattcccggacggcatttttccatcgcccgtgtatgtgccatggcggtgatttctcccgcgcggcggagtacggcaatctcttctggcgatttgaacaggcgcatttcatgaacaacaggacgccagtcgatcatcgttgccggtgcggtgagattttgccgcgaacctttacgcagtttttccagcgcactgttcatgatttcatcagcatatgcatattcgccctgggcatggtaaaccacatccaggccgttaagtagttgataaagttgctgattgatttcgctgaatgccagtgcgcggtcaacgcccagtttctctggcgcggcatcctggcctaagcgacggccaaaccagatctccgccgtcaggtcgcgaacgcggttaaacagaacgctgtggttatgagtgtcatcgcttttaatcagcaccagcaccgcttccgattcgttaaagccggtgaagtaccagaagtcactgttctgacgataggggtattcgctgtcggcgctacgtgttacttctggtgcagcaaaaatcagcgcggcgctgccgggttgcatttgctccaccagggcctgacggcgacgctgaaactcttgccgggatatctcactcataacactctccttacgttttttgtttttagtgtagagtcggtttttgtacttctggcgcggtcggttgcggatgagtaaaggtgtcgtggcataacagcgcggcaacacgaacgtattcgatgatctcttcaagcgacatttcaagctcttcctgatcttcgtcttcgtcgtaacccagttgcgcaatgttacgcagatcgtcgatagcttcaccggtttcgccggtcactttatccagcttcggttgcgtaacgccaagaccaagcaggaagtgattgacccaacctgccaatgcatcagcccgatcgaaaacgctgacatcatcgccatcaggcagataaagctgaaaaaggaagccgtcatcctgcagggcatcgctggtggcagagtgcattttacgcagtgcctgtgccagctcatgaccgaaagccatgccttcgttcgtcaggtcgtgaagtagcggcagccatgagctgtcatcgttaccgccacatatcatcccactgattaaaccatgcatctcggcaggggtcagccccgtcccttgttggttcagatactggttcatttcgttgtaaccaggcatttcgttctgtatagacataagcattcgtcgtcaaagggaggaatattcatgatatgctaccactttgggccctggtggaccagaaaagggcttgtctcttctcatcagggtagctatagtgtcgccccttcgcagaccatgggtctaaagacgaaggcagcgcagtcaatcagcaggaaggtggcatgtctgcacaacccgtcgatatccaaatttttggccgttcactgcgtgtgaactgcccgcctgaccaaagggatgcgttgaatcaggcagcggacgatctgaaccaacggttgcaagatctgaaagaacgcactagagtcacaaatactgaacagttggtcttcattgccgcattgaatatcagctatgagttagcgcaagaaaaagcgaagactcgtgactacgcggcaagtatggaacagcgtattcggatgctgcagcagaccatagaacaagcgttacttgaacaaggtcgcatcaccgaaaaaactaaccaaaactttgaatgacacttttcggtttactgtggtagagtaaccgtgaagacaaaatttctctgagatgttcgcaagcgggccagtcccctgagccgatatttcataccacaagaatgtggcgctccgcggttggtgagcatgctcggtccgtccgagaagccttaaaactgcgacgacacattcaccttgaaccaagggttcaagggttacagcctgcggcggcatctcggagattcccttcttatctggcaccagccatgacgcaactaccagaactcccactgacattatcccgacaagaaatccgcaaaatgattcggcaacgtcgtcgtgcgttaacgccggaacaacagcaggaaatgggtcaacaagccgctacccggatgatgacttatcccccggtggtgatggcgcatacggtcgctgtattcctctcttttgatggtgaactcgacacccagccgctaatagaacaactctggcgcgccggtaagcgcgtatatcttccagttttgcatccctttagtgccggtaatttgctgttcctgaattaccatccgcaaagcgaactggtgatgaacaggttgaagatccatgagccaaaactggatgtgcgtgacgtgctacccctttcccgattagacgtgctgatcacaccgctggtcgcctttgatgagtacggtcagcgcctgggaatgggcggtggtttttatgatcggaccttacaaaactggcagcactataaaacgcaaccggtgggttatgcgcatgattgtcagttggtggaaaaactccccgttgaagagtgggatatccctcttcctgcggtggttacaccgtcgaaagtctgggagtggtaagggcgatacacctgcatcgccctgattgacatcgttgattctttaacctaatttagtgagtaagggtaagggaggattgctcctcccctgtgactgactgttaataagctgggaaacttatgagtaacagtacaatcagtatgatggcaagtcgcatcataacccttctccttcaagccctcgcttcggtgagggctttaccgttacagccccatgctgcccagctatcgtaagctctctttaaataaccacaacgcattgatctacctttaaatcttttcttcgagcgtgctcgaaaaacccatgcaaaacagagataatttttgggaaaaaggatctattacggcagtaaacgtgggcgatgaagtggctatcaaaaagttcggttcagggcgatgcaccccgcatcgccctgattgacatcgttgattctttgacctaatttagtgagtaagggtaagagaggatgactcctcccctgagactgactgttaataagctccgaaacttatcagtaacagtacaatcagtatgatgacaagtcgcatcataacccttctcctttaagccctcgcttcggtgagggctttaccgttacagccccatgctgtcccgccatcgtaaatccccattaaataaacacaacgcattgatctgagtttgatttattttctggagcagactcgcaaagtagaatgcgcaacgcggcaacggtgtggagaagggataaaaaaacgggcaagtcagtgacctgcccgttaattttcagagaaggggaattagtacagcagacgggcgcgaatggtacccggaatagctttcattgcctgcagcgctttttcggcaacgtcttcgtcagcttcaatatcaataactacataacccatctgggcggaagtttgtagatattgcgcggcgatgttgacgccctgctcggcgaagattttgttcagcgcagttagcacgcccggacggttttcgtggatgtgcatcagacgacgaccaccatgcagtggcagcgagacttccgggaagttcaccgcagagagcgttgagccattgtcagaatacttgatcaatttacccgcaacttccaggccgatattctcctgcgcttcctgagtcgaaccgccaatgtgtggcgtcagaaggacgttgtcgaattcacacagtggagaggtaaatggatcgctattggtcgccggttccgtcgggaatacgtcgattgccgcccccgccagatgtttgctcgccagcgcatcacacagcgccggaatatccaccacagtaccgcgcgaggcattaatcagcagcgagccgggcttcattagcgaaatctctttcgcgcccatcatatttttggtggacggattctctggtacatgcagactcaccacatcgctcatattcagcaggtcagaaagatgctgtacctgagtggcgttgcccagcggcagtttgttttcaatatcataaaagtaaacatacattcccagcgattcagccagaatgcccaattgcgtaccaatatgaccgtagccgatgatacccagctttttgccgcgcgcttcaaaagaacccgccgccagtttgttccacacgccacggtgcgctttagcattggcttccggcacgccgcgcaatagcagcagcagttcgccaatcaccagctccgcaacagagcgcgtatttgagaacggtgcgttaaataccgggatcccgcgctttgccgccgcatccagatcaacctggtttgttccgatacagaaacagccaatagcgaccagtttttctgcggcgttgatcacgtcttcagtcagatgggtacgggatcgcaggccgatgaagtgggcatcgcggatggattcttttaattgttcatcatccagcgcgcctttgtgaaattcgatgttggtgtaaccagctgcacgaaggctttccagcgccttttggtgcacgccttctaccagcagaaacttaatcttgtctttctccagcgatacctttgccatttacccaatcctgtcttttgaaatgttgtgtgcggatttgcatccgcctttcaacatatcaaaaaataatattgcggcaatatgaacgtttgcgtcgcgatgttgaggaaatatcacgcaaaggtatttcttggttgaatatgctggtttagaggatttatttagagcaatcgacaatagccaagtaaaaacgtgacacatgtcaccaaatttaatgaagagaatttttttaacgggggaggttcccccgtcagatcatttcacaatggttttgacaccgtcaggtgtgccaatcagcgcaacgtccgcgccacggttagcaaacaagccaacagtcaccacgccaggaatcgcatttatggcgttttccatcgctatcgggtcaaggatttccatgccgtggacgtcgaggatcacgttgccgttatcggtcaccacgccctgacggtattccggacgaccgcccagtttcaccagctggcgcgccactgcactacgtgccatcgggataacttctactggcagcgggaatttgcccagaatatcaacctgcttggaagcgtcagcaatacagataaatttttccgcaaccgaagcaatgattttttcacgggtcagcgccgcgccgccgcctttgatcatttgcatgtggccgttgatttcatctgcgccatcaacgtagatgccaaggctgtcgacttcgttgagatcaaaaacgtgaatgccgaggcttttcagtttttcagtggaagcatctgaactggaaacggccccttcaatctggcctttcattgtaccgagcgcgtcaataaagtgtgcggcggtggaacctgtacctacaccaacaatggtgccgggctgaacatactgaagtgccgcccatcctactgcttttttcaattcatcctgcgtcatgatcgtttcgcctgtggtatgaaatttcacacgcattatatacaaaaaaagcgattcagaccccgttggcaagccgcgtggttaactcatccataaaatatcgcgcaatggcgggcatcccctttcgccccgcaaataaagcatacaacggtctgggtatgccgctccacggtgcgaacaggcgcaccagttccccccgttcgcaagcccctgtttacaggcaaattgaggcaataacgccaccccattcaacacaaccagggcacgaactcgctgagcgaaatgcattagcgcaaatccctgatcttttaagctgcgcgtttaaccacggatacaaatgttacccgccgacggcttcggtatatgcaacctgacacaaaattgtgtcatagtgcaggaaaaagcatttaccaggagcagacaacagcaatgaaacgcccggactacagaacattacaggcactggatgcggtgatacgtgaacgaggatttgagcgcgcggcacaaaagctgtgcattacacaatcagccgtctcacagcgcattaagcaactggaaaatatgttcgggcagccgctgttggtgcgtaccgtaccgccgcgcccgacggaacaagggcaaaaactgctggcactgctgcgccaggtggagttgctggaagaagagtggctgggcgatgaacaaaccggttcgactccgctgctgctttcactggcggtcaacgccgacagtctggcgacgtggttgcttccggcactggctcctgtgttggctgattcgcctatccgcctcaacttgcaggtagaagatgaaacccgtactcaggaacgtctgcgccgcggcgaagtggtcggcgcggtgagtattcaacatcaggcgctgccgagttgtcttgtcgataaacttggtgcgctcgactatctgttcgtcagctcaaaaccctttgccgaaaaatatttccctaacggcgtaacgcgttcggcattactgaaagcacctgtggtcgcctttgaccatcttgacgatatgcaccaggcctttttgcagcaaaacttcgatctgcctccaggcagcgtgccctgccatatcgttaattcttcagaagcgttcgtgcaacttgctcgccagggcaccacctgctgtatgatcccgcacctgcaaatcgagaaagaactagccagcggtgaactgattgacttaacgccagggctatttcaacgccggatgctctactggcaccgctttgctcctgaaagccgcatgatgcgtaaagtcactgatgcgttgctcgattatggtcacaaagtccttcgtcaggattaatccatcaaataatgcctgatagcacatatcaggcgttatcctcacttctttttgtattccttgaatcacatcacaaaatagacaaatctcaggcggcaaaaaacgacgtctgaatgcatttttttgctggcgacaaacccacgtaaaaagctcaccgtaagcgcaaataccctcattttgattgcgttttacggagcaaataatgtctaacgagcaggagtggcaacagcttgccaacaaggaattgagccgtcgggagaaaactgtcgactcgctggttcagcaaaccgcggaagggatcgccatcaagcagctgtataccgaagccgatctcaataatctggaggtgacaggtacccttcctggtttgccgccctacgttcgtggcccgcgtgccactatgtataccgcccaaccgtggaccatccgtcagtatgctggtttttcaacagcaaaagagtccaacgctttttatcgccgtaacctggccgccgggcaaaaaggtctttccgttgcgtttgaccttgccacccaccgtggctacgactccgataacccacgcgtggcgggtgacgtcggcaaagcgggcgtcgctatcgacaccgtggaagatatgaaagtcctgttcgaccagatcccgctggataaaatgtcggtttcgatgaccatgaatggcgcagtgctaccagtactggcgttttatatcgtcgccgcagaagagcaaggtgttacacctgataaactgaccggcaccattcaaaacgatattctcaaagagtacctctgccgcaacacctatatttacccaccaaaaccgtcaatgcgcattatcgccgacatcatcgcctggtgttccggcaacatgccgcgatttaataccatcagtatcagcggttaccacatgggggaagcgggtgccaactgcgtgcagcaggtagcatttacgctcgccgatgggattgagtacatcaaagcagcaatctctgccggactgaaaattgatgacttcgctcctcgcctgtcgttcttcttcggtatcggcatggatctgtttatgaacgtcgccatgttgcgtgcggcacgttatttatggagcgaagcggtcagtggatttggcgcacaggatccgaaatcactggcgctgcgtacccactgccagacctcaggctggagcctgactgaacaggatccgtataacaacgttatccgcaccaccattgaagcactggctgcgacgctgggcggtactcagtcactgcataccaacgcctttgacgaagcgcttggtttgcctaccgatttctcagcacgcattgcccgcaacacccagatcatcatccaggaagaatcagaactctgccgcaccgtcgatccactggccggatcctattacattgagtcgctgaccgatcaaatcgtcaaacaagccagagctattatccaacagatcgacgaagccggtggcatggcgaaagcgatcgaagcaggtctgccaaaacgaatgatcgaagaggcctcagcgcgcgaacagtcgctgatcgaccaaggcaagcgtgtcatcgttggtgtcaacaagtacaaactggatcacgaagacgaaaccgatgtacttgagatcgacaacgtgatggtgcgtaacgagcaaattgcttcgctggaacgcattcgcgccacccgtgatgatgccgccgtaaccgccgcgttgaacgccctgactcacgccgcacagcataacgaaaacctgctggctgccgctgttaatgccgctcgcgttcgcgccaccctgggtgaaatttccgatgcgctggaagtcgctttcgaccgttatctggtgccaagccagtgtgttaccggcgtgattgcgcaaagctatcatcagtctgagaaatcggcctccgagttcgatgccattgttgcgcaaacggagcagttccttgccgacaatggtcgtcgcccgcgcattctgatcgctaagatgggccaggatggacacgatcgcggcgcgaaagtgatcgccagcgcctattccgatctcggtttcgacgtagatttaagcccgatgttctctacacctgaagagatcgcccgcctggccgtagaaaacgacgttcacgtagtgggcgcatcctcactggctgccgatcataaaacgctgatcccggaactggtcgaagcgctgaaaaaatggggacgcgaagatatctgcgtggtcgcgggtggcgtcattccgccgcaggattacgccttcctgcaagagcgcggcgtggcggcgatttatggtccaggtacacctatgctcgacagtgtgcgcgacgtactgaatctgataagccagcatcatgattaatgaagccacgctggcagaaagtattcgccgcttacgtcagggtgagcgtgccacgctcgcccaggccatgacgctggtggaaagccgtcacccacgtcatcaggcgctaagtacacagctgcttgacgccattatgccgttctgtggtaacgccctgcgactgggcgttaccggcacacccggcgcggggaaaagtacctttcttgaagcctttggcatgttgttgattcgtgagggattaaaggttgctgttattgcggtcgatcccagcagcccggtcactggcggtagcattctcggggataaaacccgcatgaatgacctggcgcgtgccgaggcggcgtttattcgcccggtaccctcctccggtcatctgggcggtgccagtcagcgagcacgggaattaatgctgttatgcgaagcggcgggttatgacgtagtgattgtcgaaacggttggcgtcgggcagtcggaaacggaagtcgcccgcatggtggactgttttatctcgttgcaaattgccggtggcggcgatgatctgcagggcattaaaaaagggctgatggaagtggctgatctgctcgttatcaacaaagacgatggcgataaccataccaatgtcgccattgcccggcatatgtacgagagtgccctgcatattctgcgacgtaaatacgacgaatggcagccacgggttctgacttgtagcgcactggaaaaacgtggaatcgatgagatctggcacgccatcatcgacttcaaaaccgcgctaactgccagtggtcgtttacaacaagtgcggcaacaacaatcggtggaatggctgcgtaagcagaccgaagaagaagtactgaatcacctgttcgcgaatgaagatttcgatcgctattaccgccagacgcttttagcggtcaaaaacaatacgctctcaccgcgcaccggcctgcggcagctcagtgaatttatccagacgcaatattttgattaaaggaatttttatgtcttatcagtatgtgaacgttgccactatcaacaaagtggcggtcattgagtttaactatggacgaaaacttaatgccttaagtaaagtctttattgatgatcttatgcaggcgttaagcgatctcaaccggccggaaattcgctgtatcattttgcgggcgccaagtggatccaaagtcttctccgcaggtcacgatattcacgaactgccgtctggcggtcgcgatccgctctcctatgatgatccattgcgtcaaatcacccgcatgatccaaaaattcccgaaaccgatcatttcgatggtggaaggtagtgtttggggtggcgcatttgaaatgatcatgagttccgatctgatcatcgccgccagtacctcaaccttctcaatgatgcctgtaaacctcggcgtcccgtataacctggtcggcattcacaacccgacccgcgacgcgggcttccacattgtcaaagagctgatttttaccgcttcgccaatcaccgcccagcgcgcgttggctgtcggcatcctcaaccatgttgtggaagtggaagaactggaagatttcaccttacaaatggcgcaccacatctctgagaaagcgccgttagccattgctgttatcaaagaagagctgcgtgtactgggcgaagcgcacaccatgaactccgatgaatttgaacgtattcaggggatgcgccgcgcggtttatgacagcgaagattaccaggaagggatgaacgctttcctcgaaaaacgtaaacctaatttcgttggtcattaatccctgcgaacgaaggagtaaaaatggaaactcagtggacaaggatgaccgccgatgaagcggcagaaattatccagcataacgacatggtggcatttagcggctttaccccagcgggttcgccgaaagccttaccgaccgcgattgcccgcagagctaacgaacagcatgaggccaaaaagccgtatcaaattcgcctgctgacgggggcgtcaatcagcgccgccgctgacgatgtactttctgacgccgatgctgtttcctggcgtgcgccatatcaaacatcgtccggtttacgtaaaaagatcaatcagggcgcggtgagtttcgttgacctgcatttgagcgaagtggcgcaaatggtcaattacggtttcttcggcgacattgatgttgccgtcatcgaagcatcggcactggcaccggatggtcgagtctggttaaccagcgggatcggtaatgcgccgacatggctgctgcgggcgaagaaagtgatcattgaacttaatcactatcacgatccgcgcgttgcagaactggcggatattgtgattcctggcgcaccaccgcggcgcaatagcgtgtcgatcttccatgcaatggatcgcgtcggtacccgctatgtgcaaatcgatccgaaaaagattgtcgccgtcgtggaaaccaacttgcccgacgccggtaatatgctggataagcaaaatcccatgtgccagcagattgccgataacgtggtcacgttcttattgcaggaaatggcgcatgggcgtattccgccggaatttctgccgctgcaaagtggcgtgggcaatatcaataatgcggtaatggcgcgtctgggggaaaacccggaaattcctccgttcatgatgtattcggaagtgctacaggaatcggtggtgcatttactggaaaccggcaaaatcagcggggccagcgcctccagcctgacaatctcggccgattccctgcgcaagatttacgacaatatggattactttgccagccgcattgtgttgcgtccgcaggagatttccaataacccggaaatcatccgtcgtctgggcgtcatcgctctgaacgtcggcctggagtttgatatttacgggcatgcaaattcaacgcacgtagccggggtcgatctgatgaacggcatcggcggcagcggtgattttgaacgcaacgcgtatctgtcgatctttatggctccgtcgattgctaaagaaggcaagatctcaaccgtcgtgccaatgtgcagccatgttgatcacagcgaacacagcgtcaaagtgatcatcaccgaacaagggatcgccgatctacgcggtctttccccgcttcaacgcgcccgcactatcattgataattgtgcacatcctatgtatcgggattatctgcatcgctatctggaaaatgcgcccggcggacatattcaccacgatcttagccacgtcttcgacttacaccgtaatttaattgcaaccggctcgatgctgggttaatggtttgtcccgtcacgatcttcagcaatatgctgaagcatcgtggcggtataacgatgatttctgattgaataaagatattcctgcatatacatcggcctgtgcggcgcatcaaaatatttcagcgttgccggattcaccagtcgccaggcaaaatgcgggatcaccgtcagaaaatgtccgcgctccacggcgctgattttggccataaaactgtagggacgataaataatggtgggattgatcccacaaggtcgcatattcgcatcaatcattgcttcgaagttagcccggttttgaaagcgcatttgtagccagggcagctcctgaagcagctcttgctcttgacgctcttcataacggcgagaaacgagaaagcccaatcgcagcggtggtaattcactgatagtcaggttttccagttcctgaactcgtgcagatacatgctgtggggagataataaaatctaactgacggtcaaaaagattatcgataacgccgttttcgctgaactcaactggctgggcggtcacgccttcatacttatctccgagactaatcaactgatcgaaaataattgtcggataagtattatctatgccaatcacaatttctggtaatgactccaacttattgatagtgttttatgttcagataatgcccgatgactttgtcatgcagctccaccgattttgagaacgacagcgacttccgtcccagccgtgccaggtgctgcctcagattcaggttatgccgctcaattcgctgcgtatatcgcttgctgattacgtgcagctttcccttcaggcgggattcatacagcggccagccatccgtcatccatatcaccacgtcaaagggtgacagcaggctcataagacgccccagcgtcgccatagtgcgttcaccgaatacgtgcgcaacaaccgtcttccggagactgtcatacgcgtaaaacagccagcgctggcgcgatttagccccgacatagccccactgttcgtccatttccgcgcagacgatgacgtcactgcccggctgtatgcgcgaggttaccgactgcggcctgagttttttaagtgacgtaaaatcgtgttgaggccaacgcccataatgcgtgcagttgcccggcatccaacgccattcatggccatatcaatgattttctggtgcgtaccgggttgagaagcggtgtaagtgaactgcagttgccatgttttacggcagtgagagcagagatagcgctgatgtccggcagtgcttttgccgttacgcaccaccccgtcagtagctgaacaggagggacagctgatagaaacagaagccactggagcacctcaaaaacaccatcatacactaaatcagtaagttggcagcatcacccaatttctcgtgaacgacgccctgagttatggatttcattatcaatcgcagaaagtcgttgataaaccgggaacagtttttgatacagttcctgaccggctttattgaggctgatattattatctttgcgggtaaatagcgtatagccaatttgttcttccagcgcggcaatgcttttaccaaatggcgaagccgtcatatggattttttctgccgcccgggcaatattattggtttgcgctaataaaatgaaattgcgcatctttttcgaaataaaaatgtccatcccccctccccgcatccttgtccgcttaaccgtttcagtcagcctatccttgatgaaaccgcgagcaaagataggtgattacgtcatggttttacagaaaattacagaaaaaggaggcaatatcgggtaaaggcattagcccgacgaatacgtcgggctacaagtattattgtgctgcaggtgttttagcgggttgttgatccacaggttctaactggaagaccacatcgacctgatcatcaaactgaatagcggcctgctcgtaagtttcctgggcagacaccggcgcggcatcggctttcatcatccgcaccattgggctgggctgatagttggaaacatggtagcgcacgctatataccggccccagtttacgatgaaagccgttcgccagttcctgcgcctgatgaatcgcgttatcaatcgctgccttacgcgctttgtctttataggcatccggctgcgccacgcccagcgacacagaacgaatttcgttaagacccgccttcagcgcgccatccagcaaggaattcagtttgtctaactgacggagcgtgacttccaccgttctcacagcgcggtagcctttcaggatacttttaccatcctgataatcataatctggctgggtgcgtaagttcgctgagctgatatcttttttcgcgatctgattgagttcaaggaaggaaatgtattgtgcgacgcgctcatctgcctgtttcttggctgtagcggcatccttcgcggccacgttaacttcaatcgcaagagtggcaatgtctggcaccgcatccacacttgccgtaccggaggtgacaatatgcggtccatccggcaattcgttagcctgcgctgccatcccgctaatacccattaatgccgccagggcgataactttgaacttcacgttagtctctccgtgttaattgacttgcccaaaattcaggacctctggaggcaagcttagcgcctctgttttatttttccatcagatagcgcctaactgaacaaggcttgtgcatgagcaataccgtctctcgccagctgcaaggctataaaccacatgacacatcccactaccagattgataatgcgctgtgattttgccgtgcgcaggcgcggtgccagccaggctgcgagaatagccagaccaaagaaccacaggaaagaggcgctaattgtcccgagcgcaaaccaacgttttggttcgacgtcaagctgcccgccaaggctgcccagtacaacaaaagtatccaggtaaacatgcggattcagccaggtcactgccagcatggtggcgataattttccatctgccttgcttcaggacttcggcactagctaactcaatattactactcatcgctgttttaaaagcgccaaaaccataccacagcaagaaggctacgccgccccaggtgaccagcgccagcaaccacggcgactgcatcaataacgcgctgccaccaaaaatcccggcgcaaatcaggaccaaatcgctgatagcacaaagtaaggcaatcataatgtggtactgacgacgaatgccctgattcatcacaaaagcattttgtggaccgagcggcagaatcatagctgccccaagagcaataccttgaaagtaataagaaaacacgttggatattccgaattaagtatctgatgcagagactatatcgcgggattgttattagcggaaattgataatattaattggcaatcagaataactaataagagagaggccagagagtattatctggcctcagcgttgattacgcagctttgtcttctttcacccgcttaaagttcacatccatttgcgggtacgggaagctgataccggcggcatcaaattcacgtttaatacgctccagcacatcccagtacacgttttgcagatcgccgctgttgctccagacgcggaccacgaaattaatcgacgatgcaccaagttcgttcagacgcacagtcatttcgcgatctttcaaaatgcgatcttcagactggataatattggtcaggatctgcttaacctgatcgatatcggaatcatacgccacgccaataataaattcgttacggcgaactggctcgcgagagaagttaataatatttccggcaataattttaccgttcggaataacgataattttaccgtctgcagtacgcatggtggtggagaaaatctgcacactcagcacagtaccggctacgccgccgagatcaacatattctccggcacggaacgggcggaacatgacaagtaacacgccagcggccaggttagaaagtgacccctgcaaagccagaccaacagctaagcctgcggcaccgagtacagcaatgactgacgctgtttgtacacccacgcgtcccagggcagcgattagcgtaaaggcgataataccgtaacggactaatgcagaaagaaaatcagcaacagtggcatcgattttacgggagatcatcaggcgattcaccgcgttggaaatcatccgcgcgataatcaaaccaacgatgatgatcgcgagtgccgccacgatgtttactgcataacttagcagcagcgcctggttagctaccagccagcttcccgcgccgtttatgctatcgacaacattcaaatcttccattcaatattccttttcaactgactcaaaatggagaaatacactccgccgccttatgacgggcagtctgacaagggtaaacaataaagcataattttgccaaatagatcacagatttctcatctgaatcaccttgcttttggcgaaaaaaagacccgcagagcgggccttgagataagcagaaaggaatatcttacagaacgtcgatcgcgttcagttcctggaatgctttttccagacgagcgatcatcgaagtctgaccggcacgcagccatacgcgcggatcgtagtatttcttgttcggctgatcttcgcctttcgggttacccaactgcccctgcagataagcttcgttcgctttgtagtagttcagaacgccttcccaggttgcccattgggtatcggtatcgatgttcatttttactacgccgtagcttacggagtctttgatttcctgagcagtagaaccggaaccaccgtggaatacgaagttcaggctgttgtgcggcaggttgtgtttcttggaaacatattcctgagaatcacgcaggatggtcggagtcagaaccacgttacccggcttgtaaacaccgtgtacgttaccgaaggacgcagcgatggtgaaacgcgggctgattttgctcagttcggtgtatgcgtaatcaacgtcttccggctgggtgtacagtgcagaagcgtccatgtggctgttgtccacgccgtcttcttcaccaccggtgcaacccagttcgatttccagagtcatgccgattttggacatgcgctccaggtatttagagcagatttcgatgttctcttgcagagattcttcagacaggtcgatcatgtgagaagagaacagcggcttaccggtagctgcgaagtgtttttcacccgcgtccagcagaccgtcgatccacggcagcagtttcttcgcgcagtggtcagtgtgcaggataaccggaacaccataatgttcagccatctggtgaacgtgatgcgcaccagagatcgcgcccaggatagcagcaccctgcggaacgtcagatttcacgcctttaccagcgataaaggaagcaccaccgttggagaactgaacgataaccggcgctttaactttagcagcggtttccagtacggcgttgatggagtcagtaccgacgcagtttactgctggcagtgcgaagttgttttcttttgctacctggaaaactttctgtacgtcatcaccagtgattacgccaggttttacgaaatcaaaaatcttagacatgtctcttgtcctgtatcgtcgggccttatactcatcatacttcaagttgcatgtgctgcgtctgcgttcgctcaccccagtcacttacttatgtaagctcctggggattcactctcttgtcgccttcctgcaactcgaattatttagagtatgaaaaaatgcgtgctctaaaagcgcgctgaaacaagggcaggtttccctgccctgtgattttttacttcttagcgcgctcttcgagcatcgctactgcaggcagtactttaccttccacgaattcgaggaatgcgccgccgccagtggagatgtaggagattttgtcagcaatgccgaacaggtcgattgctgccagagtgtcgccgccgccagcgatggagaacgcttcgctgtctgcgatagcgttagccacgatttcagtacctttgcggaagttcgggaattcgaacacgccaaccggaccgttccacagaatggttttcgcattcttcaggatttcagccagttcctgagcggaagcatcaccgatatccaggatctgctcgtcagctttcacatcgttaacagatttcagggtagccgatgcagtttcagagaactcggttgctacgcgaacatcagacggaaccgggatgttgcaggtggtcagcagacgtttagcttcgtcaaccaggtcagcttcgtacagggatttacccacatcgtggccttgtgccgcgataaaggtgttagcgataccaccaccaacaatcagctggtcagcgattttagacagggagtccagaacggtcagtttggtagatactttagaaccaccaacgatagccaccatcgggcgagcaggttctttcagtgctttacccagcgcgtccagttcagctgccaacagcgggcctgcgcacgcaacatcagcgaatttaccgataccgtgagtagaagcctgcgcgcggtgagcagtaccgaatgcgtccattacgaacacgtcacacagtgcagcgtattttttggacagggtttcgtcgtctttcttctcgcctttgttgaagcgaacgttttccagaacaaccagttcaccttcagcaacgtcaacgccgtcgaggtaatctttaaccagacgaaccgggttagacagtttgtctttcaggtagttaacaaccggcagcagagagaattcttcgttgtactcgccttcggtaggacgacccaggtgggaagttaccatcactttcgcgccttgtttcagggccagttcgatggtcggcagagaagcacggatacgcgcgtcgctggttactttcccgtcttttactggtacgttcagatccgcacggataaatacacgtttcccagcaagatccagatcggtcatcttaattacagacatggtgaatcctctcgttgattctaaaagttttgcagacgctgcttgcgtcttacctgaaagcaacagtagccatagctaacgtcgtgtcgagcattcggttagcaaagccccattcgttatcgcaccagaccaacgttttgatcaggtgtgcgccactgacccgggtttgggtgccatcgacaatggcactgtgcggatcgtggttaaaatctacagagaccaacggcaattccgtatagtcaactataccatgaaatgcaccttgtgctgctttttgcagcaacaggttgacttcattggcttttacaggtttcttcaccgtcacgcttaaatcgattgccgtcacatttatggttggcacacgtaccgcaatcgcttcaaagcgatcgttaaattgcggaaaaaatcgtgtgataccggcggccagtttagtatcgaccggaatgatcgactggctggctgcccgggtgcgacgcaggtcaggatggtatgcatcaataacctgttgatcgtgcatggcggagtgaattgtggtcacagtgccggactcaataccgtacgcatcatctaacaatttgatgacgggaattatgcaattcgtggtacaggaagcgttagaaacgatgcggtgttccgcacgaagttgatcctgattgacgccgtaaacaacggtcgcgtcgagatcgttactgccaggatgtgaaaagagcacttttttggccccggcggcaatatgcgcttcgccatgctcgcgggagccatatacgccggtgcagtcgaggactacatcaacgccaagttcacgccaggggagcgattgcagtgaacgttcatgcaatacgcggatggcgtcatcaccaacaaaaagttgatcgcgttcctgtcgtacttcccatgcaaaacggccatggctggtgtcatatttcaacaaatgcgccatgcccgcagcatccgccagttcgttgattgccaccacggtaatttccgcccggcgtccggattcatacaaagcacgaaccacattacgcccgatgcgaccgaagccatttatcgctacgcgtacggtcatagatctcctgcaaggttttccctgagcaaatttgccagacagagtaatccagcaaatcgtccggggaaaccttacctgtcgcaaactgcgactgattggttaattgtcgaacatttaatcgactgaaacgcttcagctaggataagcgaaacgtggaataaaaggaatgattgtccagtcaaagaaaacaattatctgacttacgtcacgttttcagccccgcccctgtggaatttattccactttgcagaatcacgaataagcgtagcaaaatcttttcgttgtgccgtcacaaaccctgacttatatcagaatatgactgatgcagcgtcgatattatccgcaatacgtccgagtttcggagtactccaatgatgacattgccctacccatattcttcccccgcacgcttttatgcactgcgcctcctccccgggcaggaagttttttcccagctacacgcttttgcacagcagcatcaacttcatgccgcctggattgcaggctgtaccggtagcctgactgacgtcgccttgcgctatgccgggcaagaaggcaccacgctccttaacggtacattcgaagtgatctcactaaacggcacgctggaacagagtggtgagcatcttcatctctgcgtttccgatccacacggcacgatgcttggcggtcatatgatgcccggctgtaccgtgcggaccacgcttgaactggtgatcggtagccttgaggaactggcgtttagccgccaaccttgcgcgctttctggttacgacgagttgcatatttcccccgttaaataactactttcaaagaggttttcttatggcgcgtagccacttttccagtcaggcactggtgttgatcgttatatctatcgccatcaatatgatcggcgggcaactggccagcatggtcaaattacctatatttctcgactccatcggcacacttattagcgcggtactgcttggtccggtgatcggaatgctgaccggcttactgaccaatttactctggggattgctgaccgacccgatcgccgccgcatttgcacccgtcgcgatggtcatcggcctggtcgccggttggctggcgcgagcgggttggtttcgcaccctgccaaaagtcgttgtcagcggcgtgattattacgcttgcggtaacggtcgtcgctgtaccgctgcgtactgcgctgttcggcggtgtcaccggtagcggagccgatttgttcgttgcctggatgcactcgatggggcaaaacctggtggagtcggtggcgattacggtgataggcgcgaacctggtcgataaaattcttacagcggtgattgtctggcttttactgcgccagctgccgattcgcaccacgcgccattttccggcaatggctgccgtgcgctaaatgcatccatttacctcattaacactgtgggcattggcggcctgcaccacgcttatcctgcccgcgcagaccattttgccgatctatagcgcggcgacctttttttgtcttattgcgctaaaggccacgcggcggcgggcaaaatatgtcgcctggctgatgttctcgctgggagccgggctgtggctggtacacggtggctggctaacagaatggctaagcggcacgccgcgttcgccggagcgttggacgcatgctattacgctctggttgcggattctggcgattgtttcaacctcacagttgtggatgcagtacgtccccgtgcaatgttttatccgcgctctgtttgcttctcgcctgccgccaggcgtcgcttatctgtttgccggaccgttattggtcgttgagcagttaaaacggcaattagcgattattcatgaagcgcagcgtgcccgcggcgtgccgctggatgagggctggtatcagcgtttacgtgcgatgcccgcgttaattattctgctaacacacaatgcgcttaacgatctggctgtccgtggtgcggcgctggatatgcgggcatttcggatccacaaccgacgaacaacgttgtgggcaccagccgatagcaccctacaacgcgtagcgcgttacaccatgatcttgctgatgctaacagaattcggagcgtggatatggttacgttagaacagttccgttattgcccgacacactcaacgcatcctccgttctgttatgactttcactatgtcaaaccggggatggtcgccatctttggtgacaacggcagtggcaaaagtacgctggcacagctgatggcgggctggtatccggactttctgccaggagagataacaggcacggggacgctcctcggtacgcccattgggcatctcccgcttaatgaacaatccgccaccatccagctcgtccagcaatcgccctatttgcagctctccggctgtacctttagcgtggaagaagaagttgcctttgggccagaaaatctgtgtcttgctgaaacagagattatggcgcggattgatgccgccctgactctgaccgagtgccagccgttgcgccatcgtcacccggcaacactctccggtggagagacacaacgcgtggtcatcgcctgcgccatcgcgatgcagccaaagctcttaattcttgatgaagcctttagtcgcctgacgccgcaggccagcgaaatgctgttgcagcgcttacaacactgggcgcttgaacgtggttcgctgattattctttttgaacgtcatcgcacacctttcctgaactactgccagcaagcgtggcaattgcaaaacggagcgctccagccactatgttaacgttaaatcagatatcttatcgctggcctagcgcagcaacggattgtctttgcgacatttctctgcaactcaaacaaggtgaatggttggcgctgaccggcgacaatggcgcgggaaaatcgacgctgttacgagtaatggcaggtcttcttacgcccacagccggtacggttatgctgcaacaacaggcgatgaaaaacctgaaaaaccgccagcgcgcggcaaaggttggcgtactgtttcaggaagcggaaaaccaactttttcacagcaccgtcgctgacgagatcgcatttggtttgaaactgcaaaaatgcccggcggatgaaatcactcaacgtacccatgctgccctgcaatgttgtcagttagcagacactgccaactcgcacccgttggatctgcatagtgcgcagcgacggatggtcgccgtcgcctgcctggaagcactctctccgccactattactgctggacgagccgagtcgggattttgacgaaaattggttgagcgtgtttgaaagctggctggagaagtgccgccagcgaggcacgagcgtggtagcaatcagtcatgacgccgcatttacccggcgtcatttctctcgtgtggtgcgactggaagatggtgtaatcaggaacgttaatccaccagacgatattcacccgtagcggtcatcattaaggtcaaatttgcaggcagactctcttccagcacccggcgaacattcggcccgtcggtacggtcataaaaggcttctgcatctgccagcgatacccctcccgccagcttgcgccccaccagacgctcccgcaacgcagtagctggcgcgttgataaagatcgagaaatcacaaaattgcgcaagctggcaccacttctcgtcgtccagcaacaaccagtttccttcgacgatgacgagtggtgcggtaacgtgcaacgcatcttcaacaggatcatgcttttgtcgatcgtactgcggccacgtacaatccccttccaccacctggcgcagattttccgccagtttcgcaacgtcaaatgtctctggtgcgcctttgaaggggcgcaattgatgcgcgtccagccagctattgtaatggtgaaaaccatccatcgggagcgtctgaatagcgggcagctccgggtcttgttgcacgagatattcccagaaggtggttagggtagatttacccgtccccggcggagcgcaaagaaaaaccaccgtacgccgctgcggatttaccgtctgtaaggccgccagcatacgcagcaacggtttatgcacgcgttctatctcttcatcatggtactgcgcttgcacgttcagcccattcaccgttaattcaattttcacggcgttaattcctttaaggtggtcgttactgccagcgtcagcgccgttttgaccattccgctaaaacgcgcctctggtgatgctgccaacttactgatttagtgtatgatggtgtttttgaggtgctccagtggcttctgtttctatcagctgtccctcctgttcagctactgacggggtggtgcgtaacggcaaaagcactgccggacatcagcgctatctctgctctcactgccgtaaaacatagcaactgcagttcacttacaccgcttctcaacccggtacgcaccagaaaatcattgatatggccatgaatggcgttggatgccgggcaactgcacgcattatgggcgttggcctcaacacgattttacgtcacttaaaaaactcaggccgcagtcggtaacctcgcgcatacagccgggcagtgacgtcatcgtctgcgcggaaatggacgaacagtggggctatgtcggggctaaatcgcgccagcgctggctgttttacgcgtatgacagtctccggaagacggttgttgcgcacgtattcggtgaacgcactatggcgacgctggggcgtcttatgagcctgctgtcaccctttgacgtggtgatatggatgacggatggctggccgctgtatgaatcccgcctgaagggaaagctgcacgtaatcagcaagcgatatacgcagcgaattgagcggcataacctgaatctgaggcagcacctggcacggctgggacggaagtcgctgtcgttctcaaaatcggtggagctgcatgacaaagtcatcgggcattatctgaacataaaacactatcaataagttggagtcattaccgtgatagcaaaggacaccagggtagctaccgtaacaccggcaattgtcgccaggaacgagcctttcggcgtcagtgccaggtaagcaaagatagaccccggacttgggccagccaccagaccaccgtccagtaagttaaacacccaggtgccagacataccgcccgcaatcatggcaataatggtcagcggcttcatcagcacatacgggaaatacagttcgtggatcccaccgaggaagtgaataatcatcgccccgggcgcagaacgtttactcatccctttaccaaacaaggtaaacgccagcagcagccctaagccaggcccaggattggacgccaccataaagaagatggatttaccgttaaccgaagcctgttgcattcccagcggataatagacgccctgatcgatcgcattattgaggaaaagcactttcgccggttcattgatgactgacagcagaggcagataacccgcatgtaccagcgcctcaatacactctttgacgagagtattggcaattaacaccgccgggccgataacttcaaaacccagcagacaaaggagcatccccgcgatacctaatgagaagttattgataaccatctcaaaaccggcaggtatgcgtttttccagtgccttatcaacatattttatgaccagcccaccgagcggccccataatcattgagccaaggaacatcgggatctctgcgccgacgatcacaccaatagtacctattccgcccatgaccgcgccgcgtttaccgccgaccagatgaccaccggtagaaccaatcatcacgggcaataaataggtaatcatcgggccgacaattttggcgaaatgttcgttaggcagccaaccggtgggaataaataacgcagtaataaaaccccaggcaataaaagcaccaatattggggatgaccattgccgtcaaaaagcccccaaaagcctggacctttgcacgagcagacttgttttccataatattatcctgtagaggagagagtaattatccgcggctgattatgtccgctaattgtttttctgatgctgctgttaagagttgttcgagtatttcttcttcgcacagtaattcacttaacgcctgaatagcgccaatgtgcgaatcggcatcggcagcagaaaggccgatgagtaattttattggttcgtcattccccggaaaataaacaccttgttcaagtaatgtcaaagacatcccggttttaagcgccccacattccggtcgcgcatgaggcattgccacgcctggtgcgagaatataataagggccattgttaatggtggaatctttaattgcctgaatgtaattctcgctgatatagtttttatccagcaatgataccatcgagaaatcgatagcttcctgccaatcttttgctgaatgtataactgagattgatgattctggaaaatagtcactaagccgcataaattatccttattttatttttagggtaccgtccggcggtaaaaataaaatactcgtgcggtttaatgaaagcaattgagcagggaaaccggtgttttgaaaacagtgaattattaatttcttatataacattgagttatagatataacaacaaatgtcaatacgcatatcgtgatgcatattacataattgatatttattgcatataaatatttgtgatctacaacacgctttatctattgcttgtccgcaaacggacatatcaaggtaataaaaaaggtcgccgaagcgacctttttacccgaaatgctaattacagcagttcttttgctttcgcaacgacgttgtcgacggtgaagccgaactcttcgaacagcaactctgccggagctgactcaccgaaggtggtcataccgatgatagcgccattcaggccaacatacttgtaccagtagtcagcaatacccgcttctaccgcaacgcgtgcagtaaccgctttcggcagtacggattcacggtaagccgcatcctgcttgtcgaatgcatcggtagacggcatggaaaccacgcgcgccttcacgccttcggcagtcagtttttcgtaggcggcaacagccagttcaacttccgaaccggtcgcgatgaagatcagttccggctgaccagcacagtctttcagcacataaccaccgcgcgcgatgtttgccagttgctcttcagtacgttcctgctgcgccagattctgacgggagaggataagcgcggtcggaccgtcctgacgctcaacaccgtatttccacgcgaccgcggattcaacctggtcacacggacgccatgtagacatgttcggggtcacgcgcagagaagcgacctgctcaaccggctggtgagtcgggccgtcttcgcccagaccgatggagtcgtgggtgtaaaccatcacctgacgctgtttcatcagcgcagccatacgtacagcgttacgtgcgtattcgacaaacatcaggaaggtggaggtgtacggcaggaagccaccgtgcagggagataccgttagcaatcgcggtcataccgaactcgcgaacaccgtagtggatgtagttacccgcagcatcttcgttgattgctttagaaccagaccacagggtcaggttagacggtgccaggtcagcggagccgccgaggaattccggcaacagcgggccgaacgcttcaatagcattctgagacgctttacggctggcgattttcgccggattagcctgcagtttagcgataaactctttcgctttggcgtcgaagtcagacggcatttcgcctttcatacggcgggtaaattcagccgcttcctgcggataagctttcgcgtaagccgcaaacttctcattccatgcagattctttcgcctggcctgcttctttcgcatcccactgcgcatagatttcagacgggatttcgaacggtgcgtatttccagcccagctgttcgcgggtcagagcgatttctgcatcacccagcggcgcaccgtgggagtcgtgagtaccggctttgttcggggaaccgaaaccgatgatggttttgcacatcagcagggacggtttgtcagtcactgcgcgcgcttcttctactgcgcgtttgatggatgctgcgtcatgaccgtcgatgtcgcgaataacgtgccagccgtaagcttcgaaacgcattgcggtgtcgtcggtgaaccagccttcaacgtgaccatcaatagagataccgttgtcatcgtagaacgcaatcagtttacccagcttcagcgtacccgccagagagcaaacttcgtgggagatgccttccatcatgcagccgtcgcccatgaaggcgtaggtgtagtggtcgacaatgtcgtggcccggacggttaaactgcgccgccagcgttttttctgcaatcgccataccgactgcgttggcaataccctgacccagcggaccggtggtggtttccacaccagcggtataacctacttccgggtggcccggagttttagagtgcagctgacggaagtttttcagttcttccatcggcagatcgtaaccggtgaggtgcagcaggctgtagatcagcatggagccgtggccgttggacagcacgaagcggtcacggtcagcccaggacggattctgcgggttgtgtttcaggaaatcacgccacaggacttcggcaatgtcagccatacccataggggcacccgggtgaccggatttggctttctgtactgcgtccatgctcagcgcacgaatagcattggcaagctctttacgtgaggacattttgactccagatcggatgatgaagggcacgcccttaacgacttgacgacagcgcgttttgggctacgccggaaaatttgccaacaatttaccgcaagccgcgcgtcatgtacatggaacatccttttgccgcttcagaaatctctggatcatgctcgcatgttgcgcaatctactcgcccgtccgctgcgcttttccttatactgagactgagcgtcgattcacctgcaaacggcgcatttttagaataatcctgaccttgtgcggaagagaaaacatgaaaattcgcgccttattggtagcaatgagcgtggcaacggtactgactggttgccagaatatggactccaacggactgctctcatcaggagcggaagcttttcaggcttacagtttgagtgatgcgcaggtgaaaaccctgagcgatcaggcatgtcaggagatggacagcaaggcgacgattgcgccagccaatagcgaatacgctaaacgtctgacaactattgccaatgcgctaggcaacaatatcaacggtcagccggtgaattacaaagtgtatatggcgaaggatgtgaacgcctttgcaatggctaacggctgtatccgcgtctatagcgggctgatggatatgatgacagataacgaagtcgaagcggtgatcggtcacgagatggggcacgtggcgttaggccatgtgaagaaagggatgcaggtggcgcttggtacaaatgccgtgcgagtagctgcggcctctgcgggcgggattgtcggcagtttatctcaatcacaacttggtgatctgggcgagaaattagtcaattcgcaattctcccagcgccaggaagcagaagccgatgattattcttacgatcttctgcgccaacgcggcatcagcccggcaggtcttgccaccagctttgaaaaactggcgaaactggaagaaggccgccaaagctcaatgtttgacgaccatccggcatccgccgaacgcgcccagcatattcgcgatcgcatgagcgcggatgggattaagtaaagcctggtggtgtcgaacgtaggtcagataaggcgttcacgccgcatctgacatcaatggcacatttgttaccctgtgcgcattgccggatgcgatgctgactgcatcttatccggcctacgggtggcatcgcatctggtgcttactcgccctttttcgccgcttggatatacagcatctccagcgccagcgtcgccgcagccagagcggtgatttccgactgatcgtatgccggagccacttccactacgtccatcccaacaatgttgagatctttcaggccgcgtaccagtttaatagcgcgatcggaggtcaggccgccaatcactggcgtaccggtgcctggtgcaaaagcaggatccaggcagtcgatatcaaaagtcaggtaaaccggcatatcacccacaatctgtttcacttgggcgataacgtcatccacgctgcgatcgttcacctggcaggcgtccagcacggtaaagccgttgtctttatcaaactcggtacgaataccaatctgcacggaatgattcgggtcgatcagaccttctttcggcgcggtatagaacatagtgccgtggtcaaattcacaaccgttcgcataggtatcggtgtgggcgtcaaagtgtaccagcgccattttgccgaaatgcttcgcatgagcacgcagcagcggcagcgtaacaaagtggtcaccaccgaaggtgagcatacgcttaccggcagccagcagcttctcggcgtgcgcctgcagcttttcgctcatctcacgggcatcgccaaaggcatataccagatcgccgcagtccacgacgttcagacgctcacgcatgtcgaaattccacgggaagcggttgtgttcccaggccagattcgtcgaaacctgacggatcgctgccggaccgtggcgaccacccgcacgaccagaagtggccatatcgaacggcacgccagtaatcacccagtctgcatcgctgtcatacggctggaagttcatcggcaggcgtaaaaaaccaaaggcattggaaaccagtgagttatcgtattgatgacctaaggtgctcatggatggactcctattacaaagtcgatataaaaaaacccttccgcgtcgttaggcccgacgaggaagggttggatttgtcacaataaattgtggcggattatcaccgctaaattaagcggattcaagtaacacaggacttactcatcttcaagataagtataaccgtacaaacctgcctcgaactcttcaaggaactgttgttgcagttcagcatcaagatcggttttcttcacttgatcgcggaactgggttaacagcgttttcggatcgagctgtacatattgcagcatgtccgccacggtatcgccttcgtcagacagttctacttctacgctaccgtcagggaacacgaacacgtcaaccgcttcggtatcaccgaacaggttgtgcatattgccaaggatctcctgatatgcgccgaccataaagaaaccgagcatcggcggattctctggatcgtactccggcattggcattgtcgtggcaataccatcaccatcaatatagtggtcgatagcaccgtcagagtcacaggtaatatccagcagcacagcgcgacgttccggcacttgatccagcccttccagcggcagaaccgggaacaactggtcgatcccccatgcgtccggcattgactggaacagcgagaaattgacgtacattttgtccgccatacgttcctgcagttcgtcgattatcggacgatgcgcacggttttgcggatccagttgcttctgcacttcatggcacatgctcagatagagttgttctgcccatgcacgttcttgcaggctaaaggtgccggaagagtagccgatatgaatgtcgtgcagatccatctggctgtcgtgtaaccattcacgcaaagaacggcgagttcccggttcgtgcatttcctgccaggtttcccacatgctttgcagcgcgcgcggcgcatcttctgcgggcgcggtcggcaccgtatattcgttacgttccacgccgatgatattcgacaccagcacggtatggtgcgcagtcaccgcacggcccgattcggtgattaccgtcggatgcggcagaccattttcttcacacgcatcgccaatcgcccagatgatgttgttggcgtattcattgaggccatagtttacggagcagtcagactgcgaacgggtgccttcatagtccacgcccagaccgccgccgacgtcgaagcactgaatattgacgcccagcttgtgcagttccacatagaaacgcgcggattcacgaacgcccgtggcgatatcgcgaatattcgccatctgcgaaccgaggtggaagtgcagtagttgcaggctgtcgagacgcccggcttcacgcagggtttcaaccagttgcagtacctgagtcgcagccaggccgaacttcgatttttccccgccggaggactgccatttacccgagccctgcgaagccagacgtgcacgcacgcccagacgaggaacgacattcagacgttctgcttcatccagcacaatggcgatttctgacatcttctcaatgaccagatagaccttgtgccccatcttctcgccaattaatgccaggcggatatattcgcggtctttataaccgttgcagacgatgacgctacgggtcatgccagcatgtgccagtactgccatcaactcggctttggaaccggcttccagacccagcggttcgcccgaatgaatcagggactcaatcacgcggcggtgctggttaactttgatcggataaacaaggaagtaatcgccgttatagccgtaggattccctcgcacgtttgaacgcggcgttaatggaacgcaaacggtgctgcaggatctgtgggaaacagaacagtgcaggcagacgctgaccctgtgcttcacgagttttcactaactgcgcgagatcgacgcgagcttccgggacgtccgggtccgggcacacgctgatgtggcccagctcgttaacgtcatagtagttattgccccaccaggcaatattgtaagtacgcagcatcttgctggcttcctgggagctcattgcaacctcctgcatggagcgtagtacaccgtgttcgcccgctgacgaaggcaaacccatagacatgtcgtcagacatagcgaacctcaaattattttattaagtgtaaaacagttaacgactatcgcagcctggaactgcgataacaacccataagcacatggattttccagcagtgaatgctgacgctccaactgcgcaaccggtttctttttcataacattattaagcacataaccgaacgtaagtgtgacagttcggcgaaaccacgagaaaactcttgtttttacaagagcgcccttgttcagtcctcagtaactgtaaccagctcttgaatcctgagaagcgccgagatgggtataacatcggcaggtatgcaaagcagagatgcagagtgcggggaacgaatcttcaccagaacggtgagacaggttaagcagcagacaacggttcattatttcgtatcacctccacggccgcctgttaagacgaacccacaagccaaaactctgatttcaacccggctggaagtggcaacacgaaagaaacgtcgtgtgctttttatttaagccgcgcgccgcgttttataccccacaatggcagaaaattgcaaaagataaatacgcagaatgccggcattgtcaggaaaaatttccagccacgtttttaacagaatgagacacgattcaaaaaaaagtggaaatcgggtgaagaattgacctaaaatagccatccagatgttaatccatccataccgattaacactcagactgccagtgtttttaacctgcagagtcgtggtaggatccgctaccacagaaaatccacacaacagtttgagctaaccaaattctctttaggtgatattaaatatggcaaaacacctttttacgtccgagtccgtctctgaagggcatcctgacaaaattgctgaccaaatctctgatgccgttttagacgcgatcctcgaacaggatccgaaagcacgcgttgcttgcgaaacctacgtaaaaaccggcatggttttagttggcggcgaaatcaccaccagcgcctgggtagacatcgaagagatcacccgtaacaccgttcgcgaaattggctatgtgcattccgacatgggctttgacgctaactcctgtgcggttctgagcgctatcggcaaacagtctcctgacatcaaccagggcgttgaccgtgccgatccgctggaacagggcgcgggtgaccagggtctgatgtttggctacgcaactaatgaaaccgacgtgctgatgccagcacctatcacctatgcacaccgtctggtacagcgtcaggctgaagtgcgtaaaaacggcactctgccgtggctgcgcccggacgcgaaaagccaggtgactttccagtatgacgacggcaaaatcgttggtatcgatgctgtcgtgctttccactcagcactctgaagagatcgaccagaaatcgctgcaagaagcggtaatggaagagatcatcaagccgattctgcccgctgaatggctgacttctgccaccaaattcttcatcaacccgaccggtcgttttgttatcggtggcccgatgggtgactgcggtctgactggtcgtaaaattatcgttgatacctacggcggcatggcacgtcacggtggcggagcattctctggtaaagatccatcaaaagtggaccgttccgcagcctacgcagcacgttatgtcgcgaaaaacatcgttgctgctggcctggccgatcgttgtgaaattcaggtttcctacgcaatcggcgtggctgaaccgacctccattatggtagaaactttcggtactgagaaagtgccttctgaacaactgactctgctggtacgtgagttcttcgacctgcgcccatacggtctgattcagatgctggatctgctgcacccgatctacaaagaaaccgcagcatacggtcactttggtcgtgaacatttcccgtgggaaaaaaccgacaaagcgcagctgctgcgcgatgctgccggtctgaagtaatctttcttcacctgctttcaaaggccagcctcgcgctggcctttttcttttacctcaccgcggtggataggcattcacgccgcatccggcaaaaagctgcccgcacaataacatcattcttcctcaacacgttttatcgcaaattatcatcactactgaaaccgattacaccaataacaccagccaaatatttgtaatattttcatattattattcagttttcacagttgttacatttcttttcagtaaagtcttaattgcagataacagcgtttaatctatgatgatataactcaattattttcatgcacttaaaccataactaagataaatgttagtgtaagcgattacactgatgtgatttgcttcacatctttttacgtcgtactcacctatcttaattcacaataaaaaataaccatattggagggcatcatgcctgacgctaaaaaacaggggcggtcaaacaaggcaatgacgtttttcgtctgcttccttgccgctctggcgggattactctttggcctggatatcggtgtaattgctggcgcactgccgtttattgcagatgaattccagattacttcgcacacgcaagaatgggtcgtaagctccatgatgttcggtgcggcagtcggtgcggtgggcagcggctggctctcctttaaactcgggcgcaaaaagagcctgatgatcggcgcaattttgtttgttgccggttcgctgttctctgcggctgcgccaaacgttgaagtactgattctttcccgcgttctactggggctggcggtgggtgtggcctcttataccgcaccgctgtacctctctgaaattgcgccggaaaaaattcgtggcagtatgatctcgatgtatcagttgatgatcactatcgggatcctcggtgcttatctttctgataccgccttcagctacaccggtgcatggcgctggatgctgggtgtgattatcatcccggcaattttgctgctgattggtgtcttcttcctgccagacagcccacgttggtttgccgccaaacgccgttttgttgatgccgaacgcgtgctgctacgcctgcgtgacaccagcgcggaagcgaaacgcgaactggatgaaatccgtgaaagtttgcaggttaaacagagtggctgggcgctgtttaaagagaacagcaacttccgccgcgcggtgttccttggcgtactgttgcaggtaatgcagcaattcaccgggatgaacgtcatcatgtattacgcgccgaaaatcttcgaactggcgggttataccaacaccacagagcaaatgtgggggacagtgattgtcggcctgaccaacgtacttgccacctttatcgcaatcggccttgttgaccgctggggacgaaaaccaacgctaacgctgggcttcctggtgatggctgctggcatgggcgtactcggtacaatgatgcatatcggtatccactctccgtcggcgcagtatttcgccatcgccatgctgctgatgtttattgtcggttttgccatgagtgccggtccgctgatttgggtactgtgctccgaaattcagccgctgaaaggccgcgattttggcatcacctgctccactgccaccaactggattgccaacatgatcgttggcgcaacgttcctgaccatgctcaacacgctgggtaacgccaacaccttctgggtgtatgcggctctgaacgtactgtttatcctgctgacattgtggctggtaccggaaaccaaacacgtttcgctggaacatattgaacgtaacctgatgaaaggtcgtaaactgcgcgaaatcggcgctcacgattaatctcctcaggcttcctcccgtcgcggaggaagccgcctcttgcagtcatcttttcttcgctctatcctctgccgctatgaaaacatcccgtctccctatcgccatccaacaggccgttatgcgcggcctgcgggaaaaactcgcccaggccaacctgaagctagggcgtaactacccggagccaaaactctcttacacccagcgcggaacctccgccggaacagcctggctggaaagctatgaaatccgcctcaatcccgttttgctgttggaaaacagtgaagcttttattgaagaagtggtaccgcacgaactggcacatttgctggtatggaaacatttcggccgcgtagcgccacatggcaaagagtggaagtggatgatggaaagcgtgctgggtgttcccgcccgtcgtacgcatcagttcgaactgcaatccgtgcgtcgcaacaccttcccctaccgctgcaagtgccaggagcatcagcttaccgtacgccgccataatcgcgtagttcgtggcgaggccgtctatcgctgtgttcactgcggtgaacagctggttgcgaaataaccatctgaactatcaggaactttcctgatctggctgattgcataccaaaacaactttcgctacgttgctggctcgttttaacacggagtaagtgatgtaccgttatttgtctattgctgcggtggtactgagcgcagcattttccggcccggcgttggccgaaggtatcaatagtttttctcaggcgaaagccgcggcggtaaaagtccacgctgacgcgcccggtacgttttattgcggatgtaaaattaactggcagggcaaaaaaggcgttgttgatctgcaatcgtgcggctatcaggtgcgcaaaaatgaaaaccgagccagccgcgtagagtgggaacacgtcgttcccgcctggcagttcggtcaccagcgccagtgctggcaggacggtggacgtaaaaactgcgctaaagatccggtctatcgcaagatggaaagcgatatgcataacctgcagccgtcagtcggtgaggtgaatggcgatcgcggcaactttatgtacagccagtggaatggcggcgaaggccagtacggtcaatgcgccatgaaggtcgatttcaaagaaaaagctgccgaaccaccagcgcgtgcacgcggtgccattgcgcgcacctacttctatatgcgcgaccaatacaacctgacactctctcgccagcaaacgcagctgttcaacgcatggaacaagatgtatccggttaccgactgggagtgcgagcgcgatgaacgcatcgcgaaggtgcaaggcaatcataacccgtatgtgcaacgcgcttgccaggcgcgaaagagctaacctacactagcgggattctttttgttaacccctaccccacgcgtacaaccgcgtggggagacgacgcggatttttaactatgcgtatcccccgcatttatcatcctgaaccactgaccagccattctcacatcgcgctttgcgaagatgccgccaaccatatcgggcgcgtactgcgcatggggccggggcaggcgttgcaattgtttgacggtagcaaccaggtctttgacgccgaaattaccagcgccagcaaaaaaagcgtggaagtgaaggtgctggaaggcaagatcgacgatcgcgaatctccgctgcatattcacctcggtcaggtgatgtcgcgtggtgaaaaaatggaatttacgatccagaaatcgatcgaactcggtgtaagcctcattacgccacttttttctgagcgctgcggcgttaaactggatagtgaacgtctgaacaagaagctccagcagtggcagaagattgcaattgctgcctgtgagcagtgtggtcgtaaccgggtgccggaaatccgtccagcgatggatctggaagcctggtgtgcagagcaggatgaaggactgaaactgaatcttcacccgcgcgccagtaacagcatcaatacgttgccgttaccggttgaacgcgtccgcctgctgattggcccggaaggcggtttatcggcagatgaaattgccatgactgcccgctatcaatttactgatatcctgttgggacctcgcgttttgcgtacagagacaactgcgctcaccgccattaccgcgctacaagtacgatttggcgatttgggctaacggagaagaataatgatcaagctcggcatcgtgatggaccccatcgcaaacatcaacatcaagaaagattccagtttcgctatgttgctggaagcacagcgtcgtggttacgaacttcactatatggagatgggcgatctgtatctgatcaatggcgaagcccgcgcccatacccgcacgctgaacgtgaagcagaactacgaagagtggttttcgttcgtcggtgaacaggatctgccgctggccgatctcgatgtgatcctgatgcgtaaagacccgccgtttgataccgagtttatctacgcgacctatattctggaacgtgccgaagagaaagggacgctgatcgttaacaagccgcagagcctgcgcgactgtaacgagaaactgtttaccgcctggttctctgacttaacgccagaaacgctggttacgcgcaataaagcgcagctaaaagcgttctgggagaaacacagcgacatcattcttaagccgctggacggtatgggcggcgcgtcgattttccgcgtgaaagaaggcgatccaaacctcggcgtgattgccgaaaccctgactgagcatggcactcgctactgcatggcacaaaattacctgccagccattaaagatggcgacaaacgcgtgctggtggtggatggcgagccggtaccgtactgcctggcgcgtattccgcaggggggcgaaacccgtggcaatctggctgccggtggtcgcggtgaacctcgtccgctgacggaaagtgactggaaaatcgcccgtcagatcgggccgacgctgaaagaaaaagggctgatttttgttggtctggatatcatcggcgaccgtctgactgaaattaacgtcaccagcccaacctgtattcgtgagattgaagcagagtttccggtgtcgatcaccggaatgttaatggatgccatcgaagcacgtttacagcagcagtaacccaccttagcgagaaggatctcgttgagactctgagtgacagcgcccttctttccacgcatactgggcgctgttgcttttttgaaccaggaaacagaacctctgacaatgaatttacagcatcactttcttattgccatgcctgctctccaggatccgattttccgtcgttccgtggtctacatttgcgaacataataccaatggtgcaatggggatcatcgtcaacaagccgctggaaaatctcaaaattgaagggattctggaaaagctgaagatcacgccggagccgcgtgatgaatcaatccgtctggataaaccggttatgctcggcggtccgctggctgaagatcgcgggtttattttgcatactccgccctccaattttgcttccagcattcgcatttcagacaacacagtgatgaccacttcccgcgatgtgctggaaacgctcggcaccgataaacaaccgtctgacgtattggtggctctaggttatgcctcctgggaaaaaggtcaactggaacaagaaattctcgataacgcgtggctaacggccccggcggatctgaatattctgttcaaaacgccgattgccgaccgctggcgcgaggcggcaaaactgattggtgtggatattctcaccatgcctggtgtggcagggcacgcctgatgagtggaaccttactcgccttcgacttcggcaccaaaagcattggcgtagcggtcggccaacgcattaccggcactgctcgccctttgcctgcaattaaagcacaggacggtacgccggactggaacctcatcgaacgtttactgaaagagtggcagccggacgaaatcatcgtcggtttgccgctgaatatggacggcaccgagcaaccattgactgccagagcgcgtaaatttgccaaccgtattcatggtcgtttcggtgttgaagtaaagctccatgacgaacgtcttagcaccgtggaagcccgttccggtctgtttgaacagggcggctatcgggcgctcaacaaaggcaaagtcgactctgcctctgcggttattattctcgaaagctatttcgagcagggatattaaggcgatttaaaagcctggcggatagtcgttaccgccatcttgccggatgcggcgtgaacgcctatccggcctacatgtggcagcgattgtaggtctgataagacgcgcaaacgtctcatcagacgtttattgcctttgtaggcccgataagcttgcacatcgggcatggcaacgtcacaaacgcccttcccccactcgctgctgaaaactctgctgaaacgttatcatccccacctgctgcccggtttgaataacatgcggtaactggtgggttttcccttcgcgaatcaaattccccaccgcgggagtgttaatcaataattcaaacagcgccacgcgtccttcctgtttatccacttccagcttttgtgacaacacggcccgtaaactacctgccagttgattacgtacgggatctttttcctgcgccggaaatgaatccaccagtcgctcaactgcctgcgcggcaccacgcgtatgtaatgttgccagcaccaaatgcccggtttctgccgccgtcagtgccagacggattgtctcgctgtcacgcagctctccgagcaaaatcacatcaggatcttcccgcaatgcggcccgcaatcccgatgcgaacgtcatacagtgcaaaccaatttcccgcttctggatcaaacatcgctggctggcatagatatattcaacaggatcttccagcgtcagaatatgcgcatcggcatgttgattgagatagccaaccatcgccgccagcgtggtagatttgctgctccccgtcgcccccgtcaccagaatcaggccattctcactcttgagtaattccggcaataccgttggtgcgccaagctgttcgagctgcgggcagtgcgaaggtaacagccgtaacgccagcgaaatgccatgccgttgcgcaaatgcgctgccacgcaatcgctggttttccgccagcgacacggcaaaatccagctggccattttccagcaatattgcccgctgatcgtcatccagccactcccgcagtagctcttcgacgtccggcgcctcaaacggcgcagcttccattagcccgcgaatgcgccatcgtgcgggccaggcgctgcacaggtgtagatccgagacgttatgctttacactaagggccacaatttcttccatattcatactaagatcctcggaaaatgaacgatattgcgcataacctggcacaggtccgggacaaaatctcagcggctgcaacgcgttgcggccgttctccagaagaaattacgctgcttgcagtcagtaaaacaaaacctgcgagcgccatcgcagaagccattgatgccgggcagcgtcaatttggtgaaaactacgttcaggaaggggtagataaaattcgccactttcaggaactgggcgtaacaggattagaatggcattttattggcccgttgcagtctaataaaagccgcctggtggcagagcatttcgactggtgtcataccatcgaccgtttgcgcattgctacccgcctcaacgatcagcgcccggcagaacttccccctcttaacgtactgattcaaattaatattagtgatgaaaacagtaagtccgggattcaactggcagaactggacgagctggcagcggcggtcgctgaactaccgcgtttacgtctgcgcgggctgatggcaatccctgcgcctgagtcagaatatgtaaggcagtttgaagttgcacgccaaatggctgtagcatttgccggactgaaaacgcgctacccgcatatcgacacgctctctctgggaatgtcggacgatatggaagccgccattgcggcaggtagcacgatggttcgtatcggcactgcaatttttggtgcgcgtgattactctaaaaaataaggaattaaaggaacgccatgaatacgttgactttcctgctttcaacggtcattgagctgtataccatggtgctgttattacgcatctggatgcagtgggctcattgtgatttttacaaccccttctcacagtttgtagtgaaggtaacgcagccaattatcgggccactgcgccgcgttattccggcaatgggccccattgacagcgcctcgctgctggttgcctatattctcagttttatcaaagccatcgtgctgtttaaagtggtgaccttcctgccaatcatctggattgctggtttactgattctgctgaaaaccatcggcctgctgattttctgggtcctgctggtgatggcgattatgagctgggtaagccagggtcgtagtccgattgaatacgtgctgattcagctggccgatccgctgctgcgcccgattcgccgcctgctaccggcaatgggtgggattgatttctcgccgatgatcctcgttctgctgctgtatgtcatcaatatgggtgtcgcagaagtattacaggcaaccggaaacatgctgctgccggggctgtggatggcgttatgagtgccgtaacagttaatgatgacggtctggttttacggctctatattcagccgaaagccagccgtgattctattgtcggtttacatggcgacgaagttaaagtcgccattaccgcgccgccggttgacggccagggcaacagtcatctggtgaagtttctcggtaagcaattccgggttgccaaaagccaggtggtgattgaaaaaggcgaacttggccgccacaaacaaattaaaatcattaatccgcaacaaatcccgccagaaatcgcggcgttaattaattaggtatcctatgcaaaaagttgtcctcgcaaccggcaatgccggtaaagtgcgtgagctggcgtcgctgcttagcgacttcggtcttgatatcgtggcccaaacagacctcggcgtagattccgctgaagaaaccggcctgacctttatcgaaaacgcgattctgaaagcgcgctatgcggcaaaagtgaccggtttaccggcaattgccgacgactctggtctggcggtagatgcgctgggtggcgcgccgggtatttactccgcgcgttattccggtgaagacgcgaccgatcaaaagaatctgcaaaaactgttggaaacactgaaagacgtaccggacgaccaacgtcaggcgcgtttccactgcgtgctggtatatctgcgtcacgcggaagatccgactccgctggtatgccacggcagctggccgggcgtgattactcgcgaaccagcgggcactggtggctttggttatgatccaatcttcttcgtaccttccgaagggaaaaccgccgccgaactgacccgcgaagaaaagagcgccatttcccaccgtggtcaggcgttgaaactgctgctggacgctttacgtaatggttaaattaccgccgctgagtctctacattcacatcccgtggtgcgtgcagaaatgcccgtactgcgatttcaactctcacgcgttgaaaggagaagtgccgcacgacgattatgttcagcatctgctttgcgatctggacaatgatgtggcttacgctcagggccgtgaagtaaagacaatctttattggcggtggtacgccgagcctgctttccggcccggcgatgcaaacgctgctggacggcgtgcgtgcgcgtttgccgctggcagcggatgcagaaattactatggaagcgaaccctggaacggtagaagccgatcgctttgtcgattatcagcgtgctggtgtgaaccgcatctctattggtgtgcagagttttagcgaagaaaagctgaaacgacttgggcgtattcatggcccgcaagaagcgaaacgcgcggcaaagctggcgagcgggctggggctgcgtagctttaacctcgatttgatgcatggactaccggatcaatcactggaagaggcgcttggcgatctacgccaggccattgaactgaatccgccgcatctttcctggtatcaactgaccatcgaacccaatacgctgtttggttcgcgaccaccggtgctgccggacgatgacgcgctgtgggatattttcgaacaggggcatcagttattaaccgcagcgggttatcagcaatatgaaacttccgcttacgccaaacccggttatcagtgccagcacaatctcaactactggcgatttggtgactacatcggtattggctgcggcgcgcacggcaaagtcaccttcccggatgggcgcattctgcgtaccactaaaacgcgtcatcctcgtggttttatgcaaggaaggtatctggaaagccagcgtgatgtcgaagccgcagataagccgtttgagttctttatgaatcgcttccgtctgctggaggccgcgccgcgcgtggagtttattgcgtataccgggctttgcgaagatgtgattcgcccacagttagacgaggcgattgcccagggttatctcaccgaatgtgcggattactggcagataaccgagcacggtaaattattcttaaactcacttcttgaattattcctcgctgagtaatcattaatgcgcctgcgggcgcattaatcacttcttttccccccgttaattaacttcggcaaaatatatttcttactgaataaacatcgatgatatttattagatatatctagtgaatatttactcatcatttattgattataaacatgtacaacctggcgcacaaatttaatatttaatttctgactttatttcaagttgtgataaacatagacaagttgtcagacaggttaaccaatttgtcgcacaaagcactgataagcacaattagatatcaaccaatttccatccttcaacagggagtttttttatgaaaatgaggtcatttacccgctcattagtctgcgcatccttgctggctctggttagcactggcgtaaacgccgcagaaaaagtgacgttaaagttagcacacaacctggaaagaagtcatgttgtacatcagagttttgaagagctggcgaaagaggtaaaacagctgtcagaaggtaatatggtgatccgtatttatcccagcagccagatgggtaatgcgcgagaaactatggaattgttgcaaaatggcgcactggatatgaccaaaggttccgccagtgatctggagtcttttgataatatttatgctatctataatttgccgttcttatttaaagatcaggctcacttcaacaaagttgtttttggtgaagttggtaaagaaattatggactcaacaaaagacaaaggcttttttgctttatcagcttatgtagcgggtacacgcagtttctatgcgaaaaaaccgattactaagccagaagatcttaaagggctgaaaattcgtgttcagccaagtccgaccaccatcaaaatgattgaactgatgggtggttcacccactccaatttcatttggcgaagtttatactgcgatgcagcaaggtgtagtagatggcgcagaaaataacgtgccttcctgggtgcagactcgacatattgaaattgccaaagttttttctgaagatgaacacgcctcaattcctgactttttggttatctccaccaaaacatggaataaattaaccccagaacagaaacaaatcctcgaaacagcagcgaagaaatccgaagcttatcaacaaaaattgtgggaaaaaattgacgctgacacacgtgctcaggcgaaagctatggggggtgaaattgtaaaagtggataaagcaccattccgtgccgcagttcagcctctgtttgacgacttcaaaaaagatccaaaacaagctgctttgttagagaagttcgacaacgctgctcaataatattccgggccagtctctggccctgattttccaagatgcttacaatgatatttaaccgcctgaaacttgcggtagaccgcgtcattgccgcgttttctgtcgccgtcatgcttgctctggttgtatgcgtagtctggcaagtatttagccgctacgtacttaaccagccaagtacattaaccgatgagctggcacgatttttgatgatctgggtagggttattaggtgctgcaggtgatgctgccaacttactgatttagtgtatgatggtgtttttgaggtgctccagtggcttctgtttctatcagctgtccctcctgttcagctactgacggggtggtgcgtaacggcaaaagcactgccggacatcagcgctatctctgctctcactgccgtaaaacatggcaactgcagttcacttacaccgcttctcaacccggtacgcaccagaaaatcattgatatggccatgaatggcgttggatgccgggcaactgcacgcattatgggcgttggcctcaacacgattttacgtcacttaaaaaactcaggccgcagtcggtaacctcgcgcatacagccgggcagtgacgtcatcgtctgcgcggaaatggacgaacagtggggctatgtcggggctaaatcgcgccagcgctggctgttttacgcgtatgacagtctccggaagacggttgttgcgcacgtattcggtgaacgcactatggcgacgctggggcgtcttatgagcctgctgtcaccctttgacgtggtgatatggatgacggatggctggccgctgtatgaatcccgcctgaagggaaagctgcacgtaatcagcaagcgatatacgcagcgaattgagcggcataacctgaatctgaggcagcacctggcacggctgggacggaagtcgctgtcgttctcaaaatcggtggagctgcatgacaaagtcatcgggcattatctgaacataaaacactatcaataagttggagtcattaccattatcgctttagtcagcttgaatctgcgttgaatacccagaagaactcgattcctgcgctggaaaaggaagtgaaagcgcttgataagcaaatggtggcggcgcagaaagcagcggatgcatattggggaaaagatgcaaacggtaagcaaatgacccgcgaagaagcctttaaaaaaattcaccaacagcgtgatgagtttaataaacagaacgatagcgaggcgttcgcggttaaatatgacaaagaggtttatcaaccggcgattgcggcatgtcataaacagagtgaagagtgttatgaagtgccgattcagcagaaacgagatttcgatatcaacgaacaacggcgacagacttttctgcaatcacaaaaactcagccgtaaattgcaggatgactgggtaacgctcgaaaaagggcaatatccgttaacgatgaaagtttcagaaataaacagtaaaaaagtcgcgattttgatgaaaattgacgatatcaaccaagctaatgaacgctggaaaaaagataccgaacaactgcggcgcaatggggtgattaagtaactcatgttaagtgcctttgccggataatataaaaagttatccggcaaattattttttacattagccctagtagctgtggaatgaacaaggatatttgcggaatgtaagtgatcatcatcaacgctactaaatagctgcgcttaataccgctacacttttgccagcccatgtttgcctccggggaatgggctgacggtttccataaaatggcgaacttttttcaacagttgccacattgagctgcactgatgattacgcgttattgtgtcgtgaagtgcctgccatagccgttcaacatgattcacccatggcgagtaaaccggctgataaatgaccctgaacttcgggttctccttcagccagctctgtgtttcccggcttttgtggataatgtagttgtccacgatcagcgtgatggttttcgcccgacggtatgtcgctttaagccgcttcagcaggctgatgaacagcgccgaacttttgctgttgccgcccacacagctgactttacctgtcccgctgtgcagcgctccggccagataatatttttcattctgtcccggcgtgaccacccgtttttgctgtccgcgcagttgccagtccgcaccgattttgggattaagatggatatccacttcatcttcataaaagaccggatgctctgcgctgcattcgtccagtgctttatggattgctgccatcttttcatctttatgcgggtcacggatacgcagagttggcgcagcccttcgccacacaatccccgcagacggcaaccagcggcgaacggttccggcatttaactggcaaccggttatctcattgatttttattgccagcagttctgtactccagcgtgaacgctggtagccaaagtcgccgggagaatgttttaccagctcacgtaacagtgtgcagatatgctcaaacggccagcgacgggcacgcccggcaggtaatgatttcagtccctcaacacccgactgcgtgaaccagttaatccagcgtccaacagaggaacgggcgcagcagagcgttctggcaacgtcgctgacacggtcgccccggtgcagcatcagcatggcagtcagtctgcgggcataatttttatcgtgtgttttatggatggctttctgcatcaggcgtcgttcgtcacgggaaattggtgctatgatcggcattgctcagtccggttggtgatttgttttgatttggcgattgatcagatcgcacaatccgggctaagttccctcaaagtgatctactattccgcgcagctatttagcaatgctagcataaaatggcagcaatggtttgattaaatgttgaatcttcacacccgagatagaacaaccaacaaatagcgcactacccaccggcggtgttaacagcccaatacaaaggttggccaccatcataataccgaaatgtactgggtccattcccagctcttgtgcaatcggcaagaagatcggtgtaaagattagtacagccggtgtcatgtccataaagatgccgacaattaataagacgatattaatcagcagcaatatgatcagtgggttatcagaaatccccatcaatgcgtcgctgatcatataaggaatatcagcattagtcattgcccaggacatgcccacggaaaaaccgatcaacagtaatacaatcgaagtggtaacaaccgactccagaatcagtttgggtaaatggcgccattttacttcccggtaaatcagcaccgagagaataaatgtgtagacaacggcggtgatgctgccaacttactgatttagtgtatgatggtgtttttgaggcgctccagtggcttctgtttctatcagctatccctcctgttcagctactgacggggtggtgcgtaacggcaaaagcactgccggacatcagcgctatctctgctctcactgccgtaaaacatggcaactgcagttcacttacaccgcttctcaacccggtacgcaccagaaaatcattgatatggccatgaatggcgttggatgccgggcaactgcacgcattatgggcgttggcctcaacacgattttacgtcacttaaaaaactcaggccgcagtcggtaacctcgcgcatacagccgggcagtgacgtcatcgtctgcgcggaaatggacgaacagtggggctatgtcggggctaaatcgcgccagcgctggctgttttacgcgtatgacagtctccggaagacggttgttgcgcacgtattcggtgaacgcactatggcgacgctggggcgtcttatgagcctgctgtcaccctttgacgtggtgatatggatgacggatggctggccgctgtatgaatcccgcctgaagggaaagctgcacgtaatcagcaagcgatatacgcagcgaattgagcggcataacctgaatctgaggcagcacctggcacggctgggacggaagtcgctgtcgttctcaaaatcggtggagctgcatgacaaagtcatcgggcattatctgaacataaaacactatcaataagttggagtcattacctaccgcaagacccattaagatccctggcaaatatcccgccataaatagcgatgctacagaaacgccgccagctgtcagggaaaacacaattaacacgtttgagggcggtatcagtaatccagtaatacaagatgagacgtttacagcggtagaaaatgccggatcataaccttgtttggtctgaatgggattcagtgtgccaccaacggcagcagctgccgcaacggctgaaccagaaatggaaccaaacatcatattcgccaggacgttcacatgaccaagtgaaccaggaacccgaccaaccattacctgggcgaggttaatcaaacgtatcgcaataccgccgctgttcatcagcgttccggcaaagatgaaaaaggggattgccaatagggcaaagttatccagtccattagccagtcgctgcgaaacagtgattgccgcgatatcccagggaaacatcaaaagcattgaagctacagtggcaataccgattgagaacgaaatgggcacaccaataaagaccagcacaaaaaaacagccaaacagtgtaatcgcgatataactatccattaactggcctcctgcgcaggttgtttcagttgttgaatgctttgattaataaaacacaaggcataaaacatcatcaccaatccacttaatggcagaatgatatatacgtatcccatcggtatttgcatcgcggcagatacctgtgatgttgccagcgttttatcaattaatttcaggccaccagtcacaatgaccgaaccagcaaaacctaaaataagaacgttaatgactatactaagaagtaattgcttgcgcttattcagggcgagagcaaataaatcgatagagagatgtctctgcgcgccgacggtatatgcagcaccggtaatgactccaacttattgatagtgttttatgttcagataatgcccgatgactttgtcatgcagctccaccgattttgagaacgacagcgacttccgtcccagccgtgccaggtgctgcctcagattcaggttatgccgctcaattcgctgcgtatatcgcttgctgattacgtgcagctttcccttcaggcgggattcatacagcggccagccatccgtcatccatatcaccacgtcaaagggtgacagcaggctcataagacgccccagcgtcgccatagtgcgttcaccgaatacgtgcgcaacaaccgtcttccggagactgtcatacgcgtaaaacagccagcgctggcgcgatttagccccgacatagccccactgttcgtccatttccgcgcagacgatgacgtcactgcccggctgtatgcgcgaggttaccgactgcggcctgagttttttaagtgacgtaaaatcgtgttgaggccaacgcccataatgcgtgcagttgcccggcatccaacgccattcatggccatatcaatgattttctggtgcgtaccgggttgagaagcggtgtaagtgaactgcagttgccatgttttacggcagtgagagcagagatagcgctgatgtccggcagtgcttttgccgttacgcaccaccccgtcagtagctgaacaggagggacagctgatagaaacagaagccactggagcacctcaaaaacaccatcatacactaaatcagtaagttggcagcatcaccgcgataattgaaatcttcgctattcacgatcagatatttattattcgttttgatatcgtcgaccacccgcccacgatcgctggctgccgcctgaaaagagtaaaagttcaccgaccagccagacgcgggcgttcctttactggttaacatcgccgagaattttaccggtttatctttcgtccaggtctgttcgagcagttcgtaatctgccaactgaccgacccaggtatagagatcgtcactggaagagacatcgccttccgctgaccaggtggcctgattacccttagcatcaagattttttaaggtgatagcatcaagcttgagaatgccgtgatactgctttttgaattgatcttttaagatattttcagttggcggttcgccatctgcccaggcattaccagtcatcaacataagcagtgccgtgccaacaatccattgctttttcacccgaaaaacctcacgcggaataatttattccggtgattatcattagggtaatgaaaattggcaatggacgtaagtctgaagtgaaaaagccccggcacgataccggggcgaggtgattagtactgattgaagatctgctggatctgctgcggatctttggtttgcgtcagagccagctgcagcaggacgcgcgctttttgcgggttcagcgtgccagaggcgacgaagccgtatttcgcatcatccacttcagcatcctgagtggtagcacccgtcggtacgcgggaagaacgcactactgcagtgccgtttttcgcggcggttgccagggtgtcgaacacggatttatacaggttaccattacccacaccagcgctaacgatgccatcatagcccgcatctaccagtgctttagccggaagatcggatgcgttagcgtagttataaacgatgccgactttcggcagctcattcagcttagagacatcgaatggcgtatcgctggtgtgcttacgtgccggggtacgttggtagtcaatcttaccgttgtgaatgtatcccagaggaccgtagttaacagacttgaaggtcgctacgtcggtggtgttggttttggtgacatcgcgaccgtccagtacggtgtcgttcatcaccaccagcacgccacgattagcggaggctttatcagctgcggtcactaccgcgttatacaggttgaatggaccgtctgcgctcatggacgtggacgggcgcattgcgccgaccatcaccaccggtttgtcgcatttcaccgtcaggtcgaggaagtaagcggtttcttccatcgtgtcggtaccgtgggtaatgacgaagccgtcggttttatcgcagtcggtgttaatttttttcgccagtgtcagccagacattatcgttcatgtcctgggagccgatattcactacctgctcgcctttaacgttcgcaatgtcttttagttgcggcaccgcattaaccagattttctacgccaactttacccgctgtgtagttagatttggttgcggagtcaccaccaccggcaatggtcccgccggttgctaaaatggtgatattgggtaatgccaatgctgcaccactaaaacccataaccagtgcggcaagtgccgtctttttgaaaaactccatttcattcctccagttacgtgaacgctacgcattatcccttagctctgtatgggaaatttgacgttaaacaatttacaacgtgaatatattttggagatctacaaagttagaggcaggtaacaaaacgaagaattaaacggcataaaaaagtattatgccgtcttaaaatagaggattattttaaattcccgaccagggctttgcggctatcttccagagtcacaacgcggctacaaacatctttgccaaactgctggaaatctttttcctgctttttccactctgtttggattgaggattgcagcccccccaggcttcccagcacattctgtaatgggttaccgccgcttttcagcaccgctttcgcgcccatttcattaatgctgtcctgtaaaattccacccattgcctgattcactaattgctggccttcggcgcgaacctgatcaatggctttatagtgaaacgtcaggccatcgctgcgcgtttcgataatgcggttcatctgctctttcagctgcgcatcaagtttggtcagacggctgcgcattttgctgctttcgcccatctcctgaacgataattttatccagcgcaatacgggctttttcgacgcggcttttcgcgccttcatcaatccacggcagcgtgctgcgtagttcagcctgataatccttcgcctgctcgcgctgggcggcattcagggaatattgcttaccgttatacatcacgttgccgtctggcgtgatcaccagattgccgttttcgcccttcacctgcacggtttgcgggctgacaatcacatcgtcacgcggcgtgacgctgcactggtagtcggcgtgagcggtcattgccgtcactgaaagtgctgccgccagcagcattttgcgcatcatagtcttccctcaagaaaaaatcaggccagcatttgctggccccagattgataacaaagtacgcgttttccatgccggatgcggcgtaaacaccttatcccgcctactcgatcgtgcatctttccaggcctgataagcgtagcgcatcaggcagttttgcatttgtcatcgcccgtatgctttcttagtcccaccaaacgtcgaaaagttcgctggtgcgtacctcatccagtttgcgctcttccagccacttacgcacaatcgcctgatgttcttcggtgcatttgccgatttcctgcatgcagatcagaccttcccaggccagataaccgctgccgtcaaaggccagtttgttcggttcgataacctcgttaataaaatcatcaacggttttatcaatctgttcttccgatgtaccttccgggaatcgccatgccaccgaaaatcctaattcctggaattcgtcgatgtgcatttttttacgcagacgacggctacggttctttgccattatttcaccctctcgaacattaagtcccatactccgtgaccaagacgatgaccacgttgttcaaatttcgtcaccggacgtgatgccggacgcggcacgtaatcattgctctctgacaggtttttataaccgtcaatagaagacatcacttcaagcatatgttccgcataaggttcccagtcggtcgccatatggaatacaccccccagctgcagtttgctttttaccagttcggcaaacggcacctgtacgatacggcgtttattatggcgcgctttgtgccacgggtcagggaaaaagagctgcaccatgcgcaatgaattgtcaggaatcattttatgcagcacttcaaccgcatcgtgacacatcacgcgcaggttgcttaaaccttcttcatgcgcagaagccaggcacgcaccaacgcccggtgaatgcacttcaatgccgaggaagtcctgctcagggcgatctttagccattgccaccagcgacgcccccatgccaaaaccaatctcaagcgtcaccggcgcttcacggccaaaaagcgcggggaaatccagcatatcttcgctgaactcaacgcccatcaccggccagtagttttccagcgcatgttcctggcctttggtcagtcgcccctggcggcgcacaaaactacggatacggcgcagtgggcggccgttttcatcaaattccggtgaaatgacgtcgtttttcataaagatttagtcgcttgtgaaagtgttctgaaaacgggcattatccaaagttagttgccggatgcaagcatgataaggccgtggctgcggaaagttccggtttacaccctgccgtcgctgtgctgcaatcttgcccccaacaacagtgaattcggtgaccatgcaagcgtcgcaattttcagcccaggttctggactggtacgataaatacgggcgaaaaacgctgccctggcaaattgacaagacgccctacaaagtatggctctcagaagtgatgttgcaacaaactcaggttgcgaccgttatcccctattttgaacgctttatggcgcgcttcccgacggtgaccgatctcgccaatgcgccgctcgacgaagttctccacttgtggaccgggcttggctattacgcccgcgcgcgcaatctgcataaagcggcacaacaagtggcgaccttacacggcggtaaattcccggaaacctttgaagaagtcgcggcgttaccgggcgtcgggcgttccaccgcaggcgcgattctctcgctttctctgggtaagcactttccgattctcgacggtaacgtcaaacgcgtgctggcgcgctgctatgctgtaagcggctggcctgggaaaaaagaggtcgagaataaattatggagtttgagcgagcaggtgacgcccgcggtcggcgtggaacggtttaatcaggcgatgatggatttgggcgcgatgatttgtacgcgctcgaagccgaaatgttcgctctgtccgctacaaaacggatgtattgccgccgccaataatagctggtcgctttatccgggcaaaaaaccgaaacagacgctgccggagcgcaccggctactttttgctgttacagcacgaagatgaagtattgctggcgcagcgtccgccgagcggattgtggggcggtttatactgtttcccgcagtttgccgacgaagaaagtttgcggcagtggctggcgcaacggcagattgctgccgataacctgacgcaactgaccgcgtttcggcataccttcagccatttccacttagatattgtgcctatgtggcttcccgtgtcgtcattcaccggctgcatggatgaaggcaatgcgctctggtataacttagcgcaaccgccgtcagttggcctggcggctcccgtggagcgtttgttacagcagttacgcactggcgcgccggtttagcgcgtgagtcgataaagaggatgatttatgagcagaacgattttttgtactttcctgcaacgtgaagcagaaggtcaggattttcagctgtaccccggcgagctgggaaaacgcatctataacgagatctccaaagaagcctgggcgcagtggcagcacaagcaaaccatgctgattaatgaaaagaaactcaacatgatgaatgccgagcaccgcaagctgcttgagcaggagatggtcaacttcctgttcgagggtaaagaggtgcatatcgagggctatacgccggaagataaaaaataaaaacagtgccggagcacgcctccggcaacttgcataaaaacaaacacaacacgcacccggaatgatgaaaaaatatctcgcgctggctttgattgcgccgttgctcatctcctgttcgacgaccaaaaaaggcgatacctataacgaagcctgggtcaaagataccaacggttttgatattctgatggggcaatttgcccacaatattgagaacatctggggattcaaagaggtggtgatcgccggtcctaaggactacgtgaaatacaccgatcaatatcagacccgcagccacatcaacttcgatgacggtacgattactatcgaaactatcgccgggacagaacctgccgcgcatttgcgccgggcaattatcaaaacgttgctgatgggtgacgatccgagttcggtcgatctctattccgacgttgatgatattacgatttcgaaagaacctttcctttacggtcaggtggtggacaacaccgggcagccgattcgctgggaaggtcgcgcaagcaacttcgcggattatctgctgaaaaaccgtctgcaaagccgcagtaacgggctgcgtatcatctacagcgtcaccattaacatggtaccgaaccaccttgataaacgtgcgcacaaatatctcggcatggtccgccaggcgtcacggaaatatggcgttgatgagtcgctgattctggcaattatgcagaccgaatcttcctttaacccgtatgcggtcagccgttccgatgcgctgggattaatgcaggtggtacaacatactgccgggaaagatgtgttccgctcgcaggggaaatccggcacgccgagccgcagtttcttgtttgatcctgccagcaatattgataccggcaccgcgtatctggcgatgctgaacaatgtttatctcggcggaattgataacccaacatcgcggcgttatgccgtcatcaccgcctataacggcggcgcaggcagcgtgctgcgagtcttttcgaatgataagattcaggctgccaatattattaacaccatgacgccgggcgatgtttatcagacgctgacgacccgccatccctctgcggaatctcgccgttatctttataaagtgaataccgcgcaaaaatcctaccgccgccgataattccattaaccgcccctgacgatgctcaggggcaaaaatgttatccacatcacaatttcgttttgcaaattgggaatgtttgcaattatttgccacaggtaacaaaaaaccagtccgcgaagttgatagaatcccatcatctcgcacggtcaaatgtgctttttcaaacactcatccgcatcacaatgtgaggaaattaacatgaatcttaagctgcagctgaaaatcctctcttttctgcagttctgtctgtggggaagttggctgacgaccctcggctcctatatgtttgttaccctgaagtttgacggtgcttctattggcgcagtttatagctcactgggtatcgccgcggtatttatgcctgcgctgctggggattgtggccgacaaatggttaagtgcgaaatgggtatatgccatttgccacaccattggcgctatcacgctgttcatggcggcacaggtcacgacgccggaagcgatgttccttgtgatattgattaactcgtttgcttatatgccaacgcttgggttaatcaacaccatctcttactatcgcctgcaaaatgccgggatggatatcgttactgacttcccgccaatccgtatctggggcaccatcggctttatcatggcaatgtgggtggtgagcctgtctggcttcgaattaagccacatgcagctgtatattggcgcagcactttccgccattctggttctgtttaccctgactctgccgcatattccggttgctaaacagcaagcgaatcagagctggacaaccctgctgggcctcgatgcattcgcgctgtttaaaaacaagcgtatggcaatcttcttcatcttctcaatgctgctgggcgcggaactgcagattaccaacatgttcggtaataccttcctgcacagcttcgacaaagatccgatgtttgccagcagcttcatcgtgcagcatgcgtcaatcatcatgtcgatttcgcagatctctgaaaccctgttcattctgaccatcccgttcttcttaagccgctacggtattaagaacgtaatgatgatcagtattgtggcgtggatcctgcgttttgcgctgtttgcttacggcgacccgactccgttcggtactgtactgctggtactgtcgatgatcgtttacggttgcgcattcgacttcttcaacatctctggttcggtgtttgtcgaaaaagaagttagcccggcaattcgcgccagtgcacaagggatgttcctgatgatgactaacggcttcggctgtatcctcggcggcatcgtgagcggtaaagttgttgagatgtacacccaaaacggcattaccgactggcagaccgtatggttgattttcgctggttattccgtggttctggccttcgcgttcatggcgatgttcaaatataaacacgttcgtgtcccgacaggcacacagacggttagccactaattacgcaaagaaaaacgggtcgccagaaggtgacccgtttttttattcttacttcaacacataaccgtacaatcgtttcatgccatccgcatcggtttcgctatagacaccttgcaactccggcgaaaatcccggcaacaaattcacgccttcttccagcgcaaggaaataacgttgaaccgccccaccccagacttccccgggaaccacgcaaagcacgccaggtggataaggcaacgccccttctgccgcaattcgcccttcggcatcacgaatccgcaccaactccacttcaccgcgaatataaggcagtatgactttccgtgagacagatgctggccaacgtgggatatttaacgcgggttaacatcgttgtcagagccgcatgggtgagctgttgctacaccccggtatttccaccacggaggccagcatgaacaacaataacacattgtacgtcgggttagatgttcacaaagaatcgattactgtcgcttatgctatcaattcagaacctgttgaactgatgggtaaaattggcacatcacctactgatattcagaatctttgtaaacgtctcaggtcaaagtcatcgcaggtcagtatcgtttatgaagcggggccctgtggttatggactttatcgtcggctggtgaaatccggttttgactgcatggtctgcgccccctcacttatcccgaaaaaaccgggggagcgggttaaaaccgatcgccgtgatgccatcagacttgtgcgttcactgcgtgcaggagatctttctgctgtctacgtacccggcattgaagatgaggcattccgggatttggcccgggcatgggcatctgcccgcgatgatttacggcatgcaaggcaacgtctgaaatcgtttcttctggttcatggggtccattatgtcgggcgagcagattggggccctgcacaccgacgctggctcagcaaatactcattcgaaagtccctggcgacaattagcttttgacgaacaccgtcgtacaatagaagaccggcaggcacaatgtgaacggctggaatccgccctgaaggaggccgttaccgaatggaggctgtatccggtagtagaggcgctgcaagccatgcgagggattcagtttattactgcggttggattaatttctgaactgggtgatctgacccgttttgaacatccacgacaactgatgtcatggtttggtatcacgccatcagaatattcatcgggtggaagcagacatcagggcagcattaccaaagccggaaacagctatgccagaaagctattggtcgaggcagcgtggagttaccgtcatccggcacgcatcagtccggcaatacaaaaaaggcaggaaaatttaccccgccccgtcattgacagagcatgggatgctcaactcaggctttgtaagaggtatcgaaaacttcaggccaaaggaaagaatgtcaatattacaattgttgctgttgcacgtgagctggcgggttttatctgggatatgggccgaatagcaatgtctgtcgcacaacaaccacaatgtcacaaataaaaaatgagaataaccagttccctgaaggcgacgtagcccggtacaagagtaacccacgttagcgcttggcgacggcggaacaaagctgattcgcgacgtaagaaagtggcaggctcatatgacggacctctgtaatgcggtatccaacccgcgaatatcagcgtgattcaccgtcggatttactgctacgtcgccctcagggaattaaacctaaaaagaaaatcgtcaaaattagagattccggtttgacacggaaagtcatatcagcgctatgcgcatcctgggggttcatcaccactgacgggaaactctgctggcggaacatcgctttttgtaggtctttgacgtcgaaactgacatacagatcgtgcatctcctgacacaactggcgcagggtgtagtcgcgatagcgcaccggatatttgttataaacgctcggcaacacctcagccagcggcgagtcatcctcaatatgctgttcaaattgcgccagcatcgccaccagttgtgccagcttctcgtggctttccgccggagttaataagaacagaatggagttgagatcgcacttctccggcacaatgccgttctcacgcagatagtgcgccagaatcgtcgccggaacgccaaagtcgctatattcgccggtttcggcattgatacctggtgtagtgagtaacagcttgcacggatcaacaaaatactgatccgcggcatatccttcaaagccgtgccacttcgcccccggctcaaaactgaaaaaacggcggtcgctggctaacacagatgtcggataatcctgccacaatttgccatcaacaacgggcgggataaacgggcggaacagcttacagcgcgcaagaatagccttgcgcgactcaatacccaactcaacgcactcagcccacagccgacgcccactctccccttcatgaattttggcgttaacatccagtgcagcaaacagcggatagaaagggctggtagaagcatggagcataaaggcgttattcaaccgcttatgcgggcaaaaacgcgcctgtccgcggatatggttatcttttttatggatctgcgacgtctgtgagaatcccgcctgctgtttgtgcaccgactgagtcacaaagatccccggatcgttttcgttaagttctaatagcagcggcgagctatccgccatcatcgggataaactgttcgtaaccgacccacgcggaatcaaacagaatgtaatcacacagatgcccaacggtatcgatcacctgacgggcgttatagacagttccgtcataggttcccagctgaataatcgccaggcgaaacgggcgcggcagctcggctttttctggcgcaacgtcgcgaatttgctggcgcagatactcttcattaaaacagtgcgcatcaataccgccaatgaaaccaaacgggttgcgtgaagcttccagatagaccgacgtcgcccccgcctgaatcagcgcgccgtgatgattcgacttatggttgttacggtcgaagagcaccagatcgccacgcgttaacagcgcattcgtcaccactttattcgctgccgatgtgccgttcagcacaaaataggttttatcggcatgaaagactttggctgcgaatttctgcgcatccttcgccgatccttcatgaataagcagatcgcccaattttacgtcagcgttacacatatcggcgcgaaagacgttctcaccaaagaaatcgtaaaaatggcgtccggcaggatgctttttaaaaaacgcaccatgttgatgtccagggcaagcaaaggtgctgttgcccatctcaacgtactgcgtcagcgtgtcataaaacggtggcagcaaattctcttcatactgacaggctgcggattccagctccagccactgctgctcgttgccgttgattaccgccgtaacgcccgcaggtaattcaacagcatgttcggaatacaaaaacaccggtagatgaaaaccggtgcgcttaagcaacgcaagaatgccactgcgactatccgcagcggtaatgacgactgccgcgacatccgtaaaatcagtatctcccaacgccaccacgcggcgatgagtagaaagtcgggataccagttcactactggcggcaatattcattgatttcataagcgcaaaacccgtttcggggaagtaagaataccggacaaagtgtaaaaccctgccccatgagatatgggtcaaactggtcaccagctccgaccgccagacatcagtaaaagcagaaacgctctgattttactgttgtcctgcagtgaacgtgcgttaacttcaccgcatgagcagtaacatagaaagggaaacgtttcgcgcgaaacggcgataagcgagagaatgtaaggagatggcgtgcatcgggcaaactccgtacagagaggagaaaattcgcgcaatcatggcacctttcgctaaggcgtgcaagccaggactttgcgaccagacaagccatcaacaaggcaaaaagttcataataagaaaatcaaacaatacagctaacaggaactcttgtggtcatcggcccttttatcaacgctagtgcagtcttactgggtggcgttctcggcgcactgctcagccaacgcttaccggaacgtatccgcgtctccatgacatctatttttggtctggcatcgctggggattggtattttactggttgtgaaatgcgccaaccttccagcgatggttttagctacgctacttggcgctctaattggcgaaatttgtttgctggagaaaggtgtcaatacagcagtcgccaaagcacaaaatctgtttcgtcactcacgtaagaagccagcgcatgaatcttttattcagaattatgtcgcgattattgtcctgttttgcgccagcggcaccgggatcttcggggcgatgaacgaagggatgaccggcgatccgagtattttaatcgccaagtcatttcttgatttctttacggcgatgatcttcgcctgctcgctgggtattgcggtgtcggtaattagtatcccattactgatcatccagctaacgctagcgtgggctgccgcgctgatattaccgctgaccacaccgtcgatgatggcagacttcagcgccgtaggcggtttattgctgctggcaaccggattacgcatctgtggcattaaaatgttcccggtggtcaacatgcttccagcactccttctggcaatgccgctttccgccgcctggaccgcctggtttgcctgacaatgcgtgcaatagcggcaaagtgatgatagattgtgcagtctgcagtaaattgaagaaatttgattgacgagacgaggcgaatcaggtttaatgcgccccgttgcccggatagctcagtcggtagagcaggggattgaaaatccccgtgtccttggttcgattccgagtccgggcaccaaattcatatcaacggacctccacggaggtccgtttttcgtttcagaacgccacgatttaagcgttctgcctacaaatcaattctaccgaactcaaccagattccccccacatcaaccccattgtgtgggtataattgcgggcataccccagttcgacagaatttgtaccctctttaacgcattcagaaggctgaactatggcactgactgacgcaaaaatccgggctgcaaagcccactgacaaggcttataaactcactgacggggctggcatgttcctgctggtacatcctaatggctcccgttactggcgtctccgttatcgtattctgggtaaggagaagactctggcacttggtgtgtatccagaagtttctctctccgaagctcgtacaaaacgggatgaggcccgaaaactgatttcggagggggttgacccttgcgaacagaaaagagctaaaaaagtagtccctgatttacagctctcttttgaacatattgcgcgacgctggcatgccagtaataaacaatgggcacaatcacacagcaataaagtactcaaaagccttgagactcacgttttcccctttatcggcaaccgggatatcacaacactcaataccccggatctgcttatccctgttcgtgctgcagaagctaaacaaatttatgaaatcgccagtcgtctgcagcaaagaatatctgccgtaatgcgttatgccgtacagtctggcatcatcagatataatcctgctctggatatggctggcgcattgactacggtaaaacgccagcatcgccccgctcttgatctttctcgcctgcctgaacttttgtcgcgtattggcagttacaaagggcaacctgtcacccagcttgccgttatgctgaatttactggtttttattcgttccagtgaactcagatacgcccgctggtctgaaattgatattgacaatgccatgtggactattccagccgaacgcgaacccctgccaggcgtaaaattctcacaccggggctccaagatgcgaacaccacatcttgtgccactcagcaaacaggctgtagccatactgacagaactacagacatgggctggtgaaaatggtctgatctttacgggagcacatgacccgcgtaaaccaatcagtgaaaatgtaatgaacgcatcccacacaattaaacacggagcagtatgatggttaaaagggtgaaactggcaggtgtggagcctcgcagatttccggcatcatagtgcccaatacgggatgcataaagctccctcagactggagactccacaaatgaaatatacaccggttggcgttgatatcgcaaaacatgtcattcagattcacttcatcaatgagcacacaggtgaagtggttgataaacagttgcgtagacaggattttctgacgttcttcggcaaccgtgagccatgcctgattggtatggaggcctgtggaggttctcagcactgggcacgggaactgacaaaacttggtcataaagtccggttgttgcaggcccgcttcgttaaggcattcgtcatgggcaataagaatgatgtgatggatgcccgggctatctggatggcggttcagcagccgggtaaagaaatcgccgtaaaaacagaagaacagcagtcggtactggttctgcaccgtacccgcatgcaactggtgaagttccggaccgcacaaattaatgccctgcacgggacgttactggagtttggtgaaaccatccacaaaggccgggcagcgatggagcgggagttccccgaagcactggaacggatgaaagagagactgccaccgtatctcattatggttctggaaaaccagtacaaccgactgaatgagctggactcactgatagaggatattgaaaaacagcttaccagcgtggcgaggcagaatgaaacctgtaagcggttgctggatattcctggcgttggaccacttattgcgacggcagcggtggccaccatgggggaagcatcagcgtttaaatcggggcgagagttcgccgcatatgttggtctggttccaaaacaaactggctccggagggaaagtacgtctgctggggataagcaaacgtggtgacacttatctcaggacattatttatccacggtgcaagagcggtggcattagtagctaaagagcctggcccgtggataaccgaactgaaaaaacgtcgtccagccagtgtggcaatcgtcgccatggcaaacaagctggcacgaacagtatgggcgataaccgcccatgaccgtaagtatgacaggaaccacgtcagtatcagaccatattaatcgctgataccattaaacaatgaactcttaacaaaagggtgaatgctgaaaggttgctatggcggccagagtgatgacaaagacaggtaagaccgtgactcactaaacctgaacagtattttgggcttgaagtccgccgtgaaaataaggggtgagtcggcgaattacataggggctcgcagcgttacggctgcaataaagccggatataaagctgcaacctacccgtcatgtcaaaacaatggatgccttgcaaacgggatgcgttcatataaatactgtaaataaagccctgagggtgatggggtatgacacaacccaggatgtctgtggccatggattccgggcgatggcgtgcagtgcattgattgaatcaggtttgtggtcccgcgatgctgtggaacgtcagatgagccatcaggagcgtaatggtgtacgtgctgcgtatatccataaagcagaacatctggaagaacgtcgactgatgctacagtggtgggcagattttctggatgcgaacagagataagggtatcagcccgtttgaatatgcaaagattaacaatccattaaaatagtaagcagtccgggctgattgcccggactgctttaactgattatttttctttgtaaatgatgacgaagattgatgttctggcaagttactccggcttccattaaagtcccttcgtcatgttcttcaggctatttatgactgtgattagcaccaggaatatctggtttccatgagagcaggtaataacccccggtgttttcggctgttctggtatccttgtccaacacaggcagtcattataaacggtaaaaaatgtattcactgttatgaaatcaatagtcctgacgtactgttgaatgtgcttgtgttctgaaccttgtacaaccagtacatttgataccgaattataaacaaaacattgcatccaactttttcaatatggacaatagttgtccatatggtggttttatattcgataaatcaatggatttcattgagtcacaggactggtaatggatgaaaatgctttagggtttacctcatactggcgcaactcgcttgcggatgctgagtcaggaaagggcagttttgaacggaaagacgccaaaaatttcactcactggcatgggatagcggcgggacgtcttgacgaagcgattgtcagtaaattttttaagggagaaaaagacgatgtcgaaacggtcgatgtcatcttgcgcccaaaagtttatttccggttactgcagcatggtaaggaccgttctgcaggtgcgcctgatattgttaccccgatagtgacgccagccttgctaagccgtgagggttttttatatccgacgccagcgacctccattcccagagacctgcttgaacctttgccaaaaggagcattttcgattggtgagattgggcagtatgacaaatacaagacgacccataccacgttctctatcaactttgatgacagcgttgataagactgccgaaacggatgaagaacgggaagcacgatatgccgccttgcagcaggagtggcgtcaatatctgtatgactcagagaggctactgaagagcgttgccggcgactggattgaaaaacctgagcaatatgaactcgctgagcacggttatattgttaaaacggctcaatctggcggtgccagttcccatatcctttctctttatgatcacctgattgtttgcaataaggatgtgccgctcttcaatcgcttcgcctcgcgagaggttcatgctgcagagtctttgctggccccaggagcaaaattcagcgacaggcttggacactccggagataagtttccgctggcaaaggctcagcgcgatgccttaagccattttctggatgcaagacatggcgatatccttgctgttaatggccctccgggaaccggaaaaaccacgctggtgctttctatcatcgccacgcagtgggccagagcggctctcgaaaaatctgagcctccggttattatcgcgacttcaacgaataaccaggctgtaacgaacattattgaggcattcgggaaagacttttcgcaaggttcaggtgcgatggccgggcgatggttgccagagctgaaaagcttcggtgcttattttccctcaagcagtcgtaaagctgaggcagccaaaaaatatcaaactgaagatttcttcaaccaggttgagtcaaaagagtatgtagaggatgcactgctgttttatctggaaaaggctaaggcagcctttcctggaaaagagtgttcatcccctgaaaaggtcattgaactcctgcatggtcagttggcagcaaaatctgagcaactgataagactgaacgcaacatggcaaacgttaagccagattcgggctgcgcgtgagcttattgctaatgatattgagcaatatctcgataatttaaataaattactttccggacaagaacaaaaagtcactctactgaagagtgctaaaacggaatggaaaaaatatcgcgccggtgaatcactgatctattcattattttcctggctcccggcggttcgcaataagcgacagtaccaaatacagctgtttctcgaagataaattaggcgcgctgattgcaggaaatcagtggtctgatcctgaaactatcgaacgtaatattgatgggctgctcaattccgctgagcgcgagcaaacaacataccggcagcagattgactccgcccatgaaatcgttcttaaagaacagcaggcggttcaggagtggcagaggctggcatttgatttagggtatgagggcgacgaggaactgagcttctcacaggccgatgaactggctgatacgcagattcgcttccctgcatttttactgacgactcactactgggaaggtcgttggctgatggatatggccagcattgatgatctgcaggacgagaagaagaaaaaaggtgctaaaggggtaaccgcccgttggcaacgtcgaatgaaactcacgccatgtgtggtaatgacatgctatatgctgcccggtaatatgcagataagtgagcacaaaggacaacgtaaattcgagaaaagttatttgtatgattttgccgatttactcattgtcgatgaagccgggcaggtgcttcctgaagtggctgctgcctcgtttgcattagctaagaaggcattagtgattggcgatacggagcagatcccgccaatatggagtattgctcctgcgattgatgtcggtaacatgctggcggaaaaaattctgtctggcagtacgcaagaagagattaccgagaaatatacggcaatcgcagaccttggtaaaagtgccgcatctggcagcgttatgaaaatagcgcagtttgcttcgcgctatcaatatgatcccgaactggctcgtggtatgtacctatatgaacaccgccggtgctacgacaatattattggatactgtaatacgctctgctatcacggtaagttgttgcctaaaagagggcgtgaagagagcaatttaatgcccgcaatggggtatctccatattgatggtaaaggagagctggcaagtagtggaagtcgatataatttgcttgaggctgaaacgatagcggtctggttggcagagaaccagcaaaatattgaagcgcattacggtaaatcgcttcatgaagttgtcggtattgtgacgccttttagcgctcaggtatccactatcaaacaggtgctgggcaaacaaggtatcagtacaggcacgaatgaaaagtcgctcacagtgggcaccgtgcactctcttcagggagcggaaagagcgattgtgatattctcgccagtctattcaaaacatgaagacggcgggtttattgatagcgataacagcatgctgaatgttgcagtctcccgtgcgaaggacagttttctggtcttcggcgatatggacctgtttgaggtccagccagcctcatcgccacggggattactggcaaaatacctctttgagtcagagaagaatgcgctctcttttgattataaagagcgtaaggatttaaaaaccgccgggaccaaaatctacacacttcatggtgtggagcaacatgataatttcctgaatcagacatttgaaaataccagtaaacacatcacgataatttctccatggctgacctggcaaaggctggagcaaaccggttttcttgattccatgattgcggcgtgttcacgtggaattaacgtcacgatagtcactgacagaagctacaacactgaacataatgattttgagaagcgaaaagagaagcagcagaactttaaagcggcgctggagaaactgaatgcgctgggtattgctacaaagctggtaaaccgtgttcatagcaaaattgttattggtgatgatggtttgctgtgtgtgggatcgttcaactggtttagtgcgacacgggaagcgcgatatgaacgatacgatacatcaatggtttattgcggtgataacctgaagggtgagattgaggctatttataatagtcttgagaggcgtcaggtttagtgaggtagcctgagtttaacggacactccttcctgaaatagaatggcatcagaaggagctaataatgagcagaaaaacccaacgttactctaaagagttcaaagccgaagctgtcagaacggttcttgaaaatcaactttcgatcagtgaaggcgcttcccgattatctcttcctgaaggcactttaggacaatgggttaccgccgccagaaaagggctcggtactcctggttcccgcacggtggctgaactggaatctgaaattctgcaactgcgtaaggcgttaaatgaagctcgccttgagcgagatatattaaaaaaagcaacagcgtattttgcacaggagtcgctgaaaaatacgcgttaatcgaacaatggcgacaacaatttcccattgaagcgatgtgtcaggtatttggtgtatccaggagcggttattacaactgggtacagcatgaaccctcagacagaaaacaaagtgatgagcggctaaaactggagattaaggtggcacatatccgcactcgcgaaacatatggaacccggcggctccagacggagctggcagagaatggcatcatcgttggtcgtgaccgactggcacgtcttcgtaaggagctaaggctacgctgtaagcagaaacgcaagttcagagcgactacgaactcgaaccacaatctgccagttgcgccaaatctgctgaaccagacgttcgctcctacagcaccaaatcaggtctgggtggcggacctgacgtatgttgccacacaggagggatggttgtacctcgctggcatcaaagatgtttatacgtgcgaaattgtcggctacgccatgggagagcgcatgacaaaagagctgacaggtaaagccctgtttatggcgctcaggagccagcgcccacctgccgggctaatccaccactctgatcgaggttcacagtactgcgcatacgattaccgggtcatacaggagcagtttggtctgaaaacatcaatgtcgcgtaaaggtaactgttacgacaacgctccgatggaaagcttctggggaacgctgaaaaatgagagcctgagccactatcgttttaataaccgggatgaagccatctcagtaatacgggaatacattgagattttctacaatcgtcagcgtcgtcactctcgtctggggaatatctccccggcagccttcagggaaaaatatcatcagatggctgcttaaaaaaagaacaaatggtagtgtccgctattgccagtacacctcatagagcaggaatggtgagtagccatcttaccgatcgttttcgagcgtaagatggctgaatggaatggctattattgcacagtccttaattataacattcataccgacatgattatcttctgtccggaagaatcagaggctcagaacgctgaaaaatgagagcctgagccactatcgttttaataaccgggatgaagccatctcagtaatacgggaatacattgagattttctacaatcgtcagcgtcgtcactctcgtctggggaatatctccccggcagccttcagggaaaaatatcatcagatggctgcttaaaaaaagaacaaatggtagtgtccgctattgccagtacacctcagactggtgccaggtgaatattccagtggaaacagtattcgtcccagaggaataacaaaagttggaaacagcgaactgagacgtctgctttacgaagccgcttggtcttatcgtacacctgcaaaagttggagcatggcttatatattaccgaccggactctgtaacacaatattccaaagatattgcatggaaagctcaacaacgattgtgttctcgttaccgaactctgacagcaaaagggaaaaaatcacaagtagccattacggcggtggctcgtgagttaactggatttatgtgggatattgcacttgctgcccaatcatcattcagtcagcagaagcaaaattaaaccctgaagcagtcagacacggaatgagtgatcctcgaaaaagttttcttcccgagacagactgcacgaagcgctctttctgctgcattattatctacctcagccaggccatcatcacagaagttgcacaacgcagcccagtgcttcctgatataccggaacgcatctcccagacgacatttcttcgataacgtgtgttctttctcctgcatcagcttatacagggaagtcaggagcggtctactctgcatttgcctgaccgccaggcgttcagacaccggtaacccgcgtatatcgtgctctatggcgtacagttcaccgattagtttcagagcttcttccgccgtcgcgcttttagtactgatatatacatcgtggattttgcgtcgcgcatgagcccagcatcctgcttccgtccgtcggcgcgcagctctccaatccggataatatcaccgacaacgccgaccggatcagtgatgagtggaaggccttcgaccgcgccatcgaaagtaaccacggtgttcctgaggctgccgcacgcctgaaagaacacctccgggacttccgtaacacacatgccgccgcacagctgggcgtttctgctgtggcggcccttcccggtgatcgcctctctgccgcactgatggttaaatcacacggcaccgtcagtgtcgacggtaaagtctctgatgctgacctcacttacctggaagaggtggcaaacagcaccgggcaggaggtggacaaaagccgcctgacatcacaggcctttgcccgcgcggcactgatcactgatgtgggtattgctctggctacggaactggaaacggccgggcagaaatggtctctgggcttcccccccaaattccagcgcgtcgacctgttcaactacaacgtgctggtcagaaattatgacagcagcgccttcaaaggcgaccgctaccacaacacgaaaaatggcatcaacgccgacatcggtgccagtacggacctggatgacaactggacgctgggactggtcgcacagaacctgatcccccgtagtattgagacaaaagaagtgaacggtatcacggaaaccttcaggatccgcccgcaggtgacggccggtgtctcctggcacaacgcgatgttcaccaccgcatttgatgtggatctgaccccggccagcggtttcacctccgacagcaaccgtcagtttgccgccattggcgcagaatttaatgcctggaaatgggcacagctgcgcgccggttaccgtcagaatctggccggtaacgacggcagtgcattcacggccggggtggggatctcaccgtttgatgtggttcaccttgatgttgcaggcctgatcggcacggacaacacttacggtgcggtcgcacagttccagttcaccttctgagttccacctgcaaaacagcatgcacattatcgctgcatgttgtttccatcatcaaaagtctgtcggacatcgacagacttaactcccccggataatacagaaaacctgtaaaggattgaccggaaacaacaaagatcaaattttgatcgcaaagttcaaaatacaaacaccaagtgatcaatatctgaccaatcaatcacttgtgcttatctttttttttcattttgttacatctgtcatacaaatataactgacagtgattatcattatacccttatcagttacgtaccatgactgatagttccccgttgtaattaaatgctatcccataaccacaactcagaaatatcggagttcacgtatgaataaaatttattcactgaaatatagtcatattacaggtggattagttgctgtttctgaactgacccggaaagttagtgtcggtacatcaagaaagaaagttatcctcggtattattttatcctcaatatatggaagttatggcgaaacagcatttgcagcaatgctggatataaataatatatggacccgcgattatcttgaccttgctcaaaacagaggagagttcagaccgggtgcaacaaatgttcaattaatgatgaaagatggaaagatatttcattttccagaactacctgtacctgatttttctgctgtttccaacaaaggtgcaacaacatcaattggaggtgcgtacagtgttactgcgactcataacggtacacagcatcatgcaataacaacacagtcatgggatcagacagcatataaagcaagtaacagagtatcatctggcgacttttcggttcatcgtctgaataaattcgtcgtggaaacaacaggggttacggagagtgccgacttctcactttctcccgaagatgcgatgaaaagatatggcgtaaactacaacggtaaggaacaaataattggcttcagagcaggtgccggaacaacctcaacgatattaaacggcaaacaatatctgtttggacaaaactataatcccgacttgttaagcgcaagtctttttaatctggactggaaaaacaagagttacatttataccaacagaaccccttttaaaaactcaccaatttttggcgatagtggttctggttcttatctatatgataaagaacaacaaaaatgggttttccatggtgttaccagtacagttggttttctcagtagtaccaatatagcctggacaaactactcgttatttaataatattctggtaaacaatttaaaaaagaatttcacaaacactatgcagctggatggtaaaaaacaagagttatcatcgattataaaagataaggacctgtctgtctcaggaggaggggaattaacgctcaagcaggataccgatcttggcattggcgggcttatattcgataagaaccagacatataaagtgtacggaaaagataagtcttataaaggtgccgggatagatattgataataataccaccgttgaatggaatgttaagggcgttgccggagataatctgcataaaataggtagtggtactctggatgtaaaaatagcacagggaaataaccttaaaataggtaatgggactgtcatccttagtgctgaaaaagccttcaataaaatttacatggccggaggtaaaggtacggtaaaaataaatgccaaagacgctttaagcgaaagcggtaatggcgaaatctattttaccagaaatggcggaacactggatctaaacggctatgaccagtcatttcagaaaatcgcagcaacagatgcgggaacaaccgtaacgaactcaaacgtgaagcaatcaacattatcacttactaatactgatgcatatatgtaccatgggaatgtatcaggtaatataagcataaatcatattatcaatactacccagcaacataacaataatgccaatctgatctttgatggctcagtcgatatcaaaaacgatatctctgtccggaatgcacagttaacattacaaggacatgcgacagaacatgccatatttaaagaaggcaataacaactgtccaattccttttttatgtcaaaaagactattctgctgccataaaggaccaggaaagcactgtaaataaacgttacaatacggaatataagtccaacaatcagatagcctctttttcccagcccgactgggaaagtcgtaaatttaatttccggaaattaaatttagaaaacgcaaccctgagtataggccgggatgctaatgtaaaaggacacatagaggctaaaaactctcaaattgttctgggaaataaaactgcatacattgacatgttctcaggaagaaacattactggcgaaggttttggattcagacaacagcttcgctccggggattcagcaggcgaaagtagtttcaacggcagtctgagtgctcaaaacagcaaaataactgttggtgataaatcaactgttactatgactggtgcattatccttaattaatacagacctgattatcaacaaaggagctactgttaccgcccagggaaaaatgtatgtagataaagctattgaactggccggaaccctgacattaacaggcacccctacagaaaataataaatacagcccggcaatctatatgtcagatggatataatatgacagaagatggtgccacgttaaaggctcaaaattatgcctgggtcaatggtaatataaaatcagacaaaaaagcatctattctgtttggtgttgaccagtataaagaagataacctggacaaaaccacacacacaccgctggctacaggtttgctgggtggctttgatacttcttataccggaggtattgatgctcctgctgcctcagccagcatgtataacaccttatggagagtaaacggacagtcagccctgcaatcattaaaaacccgcgacagtcttttgttgtttagtaacatagagaattcgggtttccatactgtgacagtaaacacactggatgccactaatactgctgtgattatgcgggctgatctgagccagtctgtaaatcaatcggataaactcattgttaaaaatcagttaaccggaagcaataacagtctgtcggtcgatatacagaaagtgggaaataataactcaggattaaacgttgacctgataacagccccaaaaggaagcaataaagagatatttaaagccagtactcaggccataggtttcagcaacatatctcctgtgatcagcacgaaagaggatcaggaacataccacgtggaccctgaccggatataaggtggctgaaaatacagcatcttccggtgcagcaaaatcgtatatgtccggtaattacaaagccttcctgacagaagtcaacaacctgaataaacgaatgggggatctgcgtgacaccaatggcgaggccggtgcatgggcccgcatcatgagcggagcaggttcagcttctagtggatacagtgacaactacacccatgtgcagattggtgtggataaaaaacatgagctggatggacttgaccttttcactggtctgactatgacgtataccgacagtcatgccagcagtaatgcattcagtggcaagacgaagtccgtcggggcaggtctgtatgcttccgctatatttgactctggtgcctatatcgacctgattagtaagtatgttcaccatgataatgagtactcggcgacctttgctggactcggaacaaaagactacagttctcattccttgtatgtgggtgctgaagcaggctaccgctatcatgtaacagaagactcctggattgagccgcaggcagaactggtttatggggccgtatcaggtaaacggttcgactggcaggatcgcggaatgagcgtgaccatgaaggataaggactttaatccgctgattgggcgtaccggtgttgatgtgggtaaatccttctccggtaaggactggaaagtcacagcccgcgccggccttggctaccagtttgacctgtttgccaacggtgaaaccgtactgcgtgatgcgtccggtgagaaacgtatcaaaggtgaaaaagacggtcgtattctcatgaatgttggtctcaacgccgaaattcgcgataatcttcgcttcggtcttgagtttgagaaatcggcatttggtaaatacaacgtggataacgcgatcaacgccaacttccgttactctttctgataacagcccgggccgcgtttgcggcccttcttctaccgtagagaatatgtattaccctgtgacagactatatcgctcttgctctcattattagctttctttttctgacattatttatctgcctgttatgccttaaacatgagcgaataaaaaaagaaactatcaggcaaaaaaatgcacatattctggagcatggctggaatgcaactgagttctcatggttccgatacggacagtataacgaaacgggtatttacatctcgatcgagaagaccattatcattacaatcaccgtttctggtgagtgctttaaaaaagaatacagcattgtctcccacatgctggtcactgacaccataacagaggccaccctgtacgaaaacgggctgtatacgcgccacatcagactcagtcgcccagtatctgacagcaaataccccttgccacccggatctcagctcattaaaaatatgaccttacgactgcgcctgcaggatcagcaggaagaaacatccgtgacattatttcagggaaaaatgagtaccgacggaaataactattacatcatcaaaggtaaagtaagctcagtacttctgttattaaaaatgctgcagattaatcacgcctgatctctgtcccggtattttgaggtgtactgaggtgtactggcaatagcggacactaccatttgttctttttttaagcagccatctgatgatatttttccctgaaggctgccggggagatattccccagacgagagtgacgacgctgacgattgtagaaaatctcaatgtattcccgtattactgagatggcttcatcccggttattaaaacgatagtggctcaggctctcatttttcggtgatgctgccaacttactgatttagtgtatgatggtgtttttgaggtgctccagtggcttctgtttctatcagctgtccctcctgttcagctactgacggggtggtgcgtaacggcaaaagcactgccggacatcagcgctatctctgctctcactgccgtaaaacatggcaactgcagttcacttacaccgcttctcaacccggtacgcaccagaaaatcattgatatggccatgaatggcgttggatgccgggcaactgcacgcattatgggcgttggcctcaacacgattttacgtcacttaaaaaactcaggccgcagtcggtaacctcgcgcatacagccgggcagtgacgtcatcgtctgcgcggaaatggacgaacagtggggctatgtcggggctaaatcgcgccagcgctggctgttttacgcgtatgacagtctccggaagacggttgttgcgcacgtattcggtgaacgcactatggcgacgctggggcgtcttatgagcctgctgtcaccctttgacgtggtgatatggatgacggatggctggccgctgtatgaatcccgcctgaagggaaagctgcacgtaatcagcaagcgatatacgcagcgaattgagcggcataacctgaatctgaggcagcacctggcacggctgggacggaagtcgctgtcgttctcaaaatcggtggagctgcatgacaaagtcatcgggcattatctgaacataaaacactatcaataagttggagtcattacccatttttcagcgttccccagaagctttccatcggagcgttgtcgtaacagttacctttacgcgacattgatgttttcagaccagactgctcctgtatgacccggtaatcgtatgcgcagtactgtgaacctcgatcagagtggtggattagcccggcaggtgggcgctggctcctgagcgccataaacagggctttacctgtcagctcttttgtcatgcgctctcccatggcgtagccgacaatttcgcacgtataaacatctttgatgccagcgaggtacaaccatccctcctgtgtggcaacatacgtcaggtccgccacccagacctgatttggtgctgtaggagcgaacgtctggttcagcagatttggcgcaactggcagattgtggttcgagttcgtagtcgctctgaacttgcgtttctgcttacagcgtagccttagctccttacgaagacgtgccagtcggtcacgaccaacgatgatgccattctctgccagctccgtctggagccgccgggttccatatgtttcgcgagtgcggatatgtgccaccttaatctccagttttagccgctcatcactttgttttctgtctgagggttcatgctgtacccagttgtaataaccgctcctggatacaccaaatacctgacacatcgcttcaatgggaaattgttgtcgccattgttcgattaacgcgtatttttcagcgactcctgtgcaaaatacgctgttgctttttttaatatatctcgctcaaggcgagcttcatttaacgccttacgcagttgcagaatttcagattccagttcagccaccgtgcgggaaccaggagtaccgagcccttttctggcggcggtaacccattgtcctaaagtgccttcaggaagagataatcgggaagcgccttcactgatcgaaagttgattttcaagaaccgttctgacagcttcagctttgaactctttagagtaacgttgggtttttctgctcattattagctccttctgatgccattctatttcaggaaggagtgtccgttaaactcaggctacctcacagtttagtgtcagtgccccgggccatcattcatggaaacgagactttgatccggacagccccgagataaaattcagtgatcgcagggaagcccttaaactgatgacgcaaatcgaatcgaccgtgaccagcctgcaccgtgaggctgaagcacagttccggcctgaactggaaaaaatcgtcaggggtatcgaaacaggttttcgtggtacggccctgtatgccacagaaaatattgccggacgtatcaatgcccgcctggaggacgagggcttcactgtaaaaatcactttcccggcagtcagccagttacagaccaggatcgcggtaaaaacaaatctgagtgcgcttatggaggaaagaactgagacagtcacccgtcgccgtcggcagagtggtttctggggaaagatttgtggagcgtttggcaccagtgactggggctgggaaaactataaggagaatgtgagccgcagtgtgatcaatatcaactcggtcaggaaggaagtgatgtcactgacccgggcatatttcggggagttgcaggcatccattgagcagaatattaaccagcccgtccgccaggagatcgatgattttttctgtacattcagggaaaaagtcgaacagctacgtaacacactcattcagagctctgaagatcataaacgcgatcagcaggcacaggagcagcttacggagcgccttcaggcattaaatgaaagggttcccgagctgattactgacagtaaggcgttaagggaagaactggagacactgctgtgacctcaccatttattcaacaaattgctgataaccgggtatgtcaggtactcagttgccttcctgaaaaatttgtggttgattttgcaaacggtattgatgttgcacaggagcataaccgcacggccggggggcgcacgtttttccggcgtttaaaagaaggtctgactggcaaaggcgctgtacgccagaatgccatcaatgcttcgcttgcacagggcgttgaggcgtccctgcgctggctgacggagctgacaacgtcgcttgccaccacaaattacgcgattacccgggtaaacgacagggtcagttcactggtcagtgatactgccaggctggcgcattattcggcagacacgcgggagcagttactcaccctggcagaacaggttcatcagaaactgaatcatcttgaagaaaaactccaccgtgttgaccaggttcagcgggcacagttacatcttgagcagatattctcatggtggagcgccgggcgatacgcgtcattttcccctgccggacgttgttatgtggcgcttgaagagcttcgctggggcgcgtttggtgatgtgatacgtcagggtgaaacaggccaggttaaccagttactggatatcctcagacataaagcattaacgcaaatggcacaggagaatggcggtagcgcaacagtacgtctgaacacactggactggcttggtggtcagagccgggaacaggctgataacgaatggcatgaagcggttaactggctgggggactggtgcagtgaagagcggcatcctgtgatctggtcaaccacacaggctgcagaacacttaccggttcgtatgccccgtctctgctctgcagaacgcctctctgaaagtatggttgatgaaatatttcagaagggggaggcatgagtacagaaatgaaaacggggctggtgctgtccggcggcggggcggtgggcgcttatcaggcgggagtggttaaggcactggcagagtgcggcgcacagatcagtatggtctcaggagccagtatcggggctctcaatggtgccattatcacggcctctcccgatctgtcagaagccgccttacgcctggaggcgctctgggatcatctggggaataatcaggttctgtcggtaaacagatcggtttacttttcattgctgaaaaaactggttcaggccatgaacctctgccagatccccggacgtgcgggcgcactgcttacgacgctttttcgccatatatcgacaatcaacgggttcgacaatccgatgattcagccgctgttgtcagatgagcccctgacagcgctgatggatcattatcttgatacagatgctctggccgacgggctaccgctgtacgtgtcgctgtaccccacagaaggaggcatgcaggatattattgactgcattcgtgctgaactgggtgccggaaccacgaaaaacgctgtttttcagcatatccagagtctgccccgcgggcagcagaaagaagccttactggcgtcagccgcgctgcctctgctgttccgtccccgcgaggttcagggaacaatgtacggtgatggtgggatgggcggatggcgaaacaggcaggggaatactcccgtgacgccactggtggatgccggatgcaatatggtgattgtgacgcatctgagtgacggttctttatgggatcgtcgggcttatccggacaccacaatccttgaaatccgtccccggaaaaggttgaaacaaatcggggacgaaggcaaaagtggcggtctgctcagttttacatcggcacataccgacgcctggcgtcagcagggctacgaggacacgatgctgacgatggagcatatccggaaaccgctggcagcacgtcaggcactgacccggtcagagacggtattgcagaaaagcctggagataactgaaggtgcagattcggcactgagaaacgcgatggcccggattaaataaagacgctccggagaaacgccaccgccactgtggtggtgtttttcctgtctggtattattgaaaatattttcagatatatattacctggatgatggttaagattaatttatttaattttggggagaaaactcatgaaactgttaaacattcttttagctgttgttttaactgtaagtgcaaccgtagcacaaacagaatcggcattgtagacgcgtaacagtattgctggcactgatatgttcagtatcggtaatgtttctattaactgcacgattaatccagaagacaacaatttgctaccacactatgtgtggatttacggtcatacctccacccagctaaatcagtacgattctgatattatttttatcatcaacgataaaaagtatccggccccatctgtcgacggaacacgaatgaataagaatgcatgggtatactttatcgatgctatcagtgaagccacgcaattcgacgttttagtaaacggtaagaaagtcgacagctataccgcaaatatcaaaaatgtgaaaaaaactttgggtaacaaattctacgacagctgctggaacacctggttccaggaataattgataacgtggtgtaaaacacctcagtttaatttaatacaatgagtgaaaatgaatattataaaaatattttttgtttcagatgtcatatattttattaactgaatgattaacaggagaatcagatgaactggcattatgaaaaaaatggtgtacgttatgataacgtaacagaggaagatattatcgaacgtatccggcgtggtgaactgaatgcatcaacactggtgtggcaacagggcatgctggaatggcagccagtttcagccacatcactggcggaaatactgaaacaaagtgaagttcccccagcccttccgggtcaccgcattcccggaggcgttgtctggacgctggcatttgcccctttgattgggtacatacttgagatgtggactgcagggctgaacggtatgtcatttgaacgggcttatgatgcagtcagcgaaggccagtactggtttatctctctgattctgaatattgctctgggatatctggatgaacgaaaactccgtaaatctggtgttgatactgcaacatttggctggctggcatggttgatcccggtttatctgtggcgtcgggcaaaaatcctcggacaaaaacctgcgtatttctgggtctggttggttatgctgatactggtgttatttacggtctgatattctttatcgcagagtttactaaataatcaggttattagtgttcttaacaggtaaggtgatgctgccaacttactgatttagtgtatgatggtgtttttgaggtgctccagtggcttctgtttctatcagctgtccctcctgttcagctactgacggggtggtgcgtaacggcaaaagcactgccggacatcagcgctatctctgctctcactgccgtaaaacatggcaactgcagttcacttacaccgcttctcaacccggtacgcaccagaaaatcattgatatggccatgaatggcgttggatgccgggcaactgcacgcattatgggcgttggcctcaacacgattttacgtcacttaaaaaactcaggccgcagtcggtaacctcgcgcatacagccgggcagtgacgtcatcgtctgcgcggaaatggacgaacagtggggctatgtcggggctaaatcgcgccagcgctggctgttttacgcgtatgacagtctccggaagacggttgttgcgcacgtattcggtgaacgcactatggcgacgctggggcgtcttatgagcctgctgtcaccctttgacgtggtgatatggatgacggatggctggccgctgtatgaatcccgcctgaagggaaagctgcacgtaatcagcaagcgatatacgcagcgaattaagcggcataacctgaatctgaggcagcacctggcacggctgggacggaagtcgctgtcgttctcaaaatcggtggagctgcatgacaaagtcatcgggcattatctgaacataaaacactatcaataagttggagtcattaccccggctgcgttataaagcaaggaatgacgctgaaaaaatgcctttaaagttggaattaacgagagcaccacatccagacattgcccaccgaagtaagcaaacgctgctcccagcacaccaaacagatgacagaacatgaacagcaatacgatgtagccgattgaggcgatggtttgcgccacgagaaaagcgcgctgttttcccgccatcaatagcaatgactcctgcgggaaacccagcatcgaaatcacaattgcgcccagcatcacctgaatcaggtcatacgcttcgagatacttaacgccaaacaccagcgaaatgagcggcttgccggcgatcaacaccgcgagcgccaccagaataccgattccgcccgccagtaaaccggacttcacacctaacaaccacggtctggtggtgcgcggatctaaacgcatcacctctgggtaaaaacttttacccagcaaacccgctggcgttccggcggcgtcgaagaatgtcatggcgattttaaataacccggcggcagcgggtcctaacacgatccccaccagcactgtgctgcacgagttacgcgccgaccagatggagtgggcaatgttggttgaccagacaaaactccacgcgcctttgatgtgtcgggcagactcaaacagattcaatttgaaggcattatggatatttctgcggcgtaattcgcgcgctgcaaaccaccagtacatggtgccgccaaccagattcgacacgtaccaggcaataacaaaacccgcaaaaccaaagtcaaaataccaggctacgacgctccccgctgcgcgcagaaaaggtttcgtcgcctgctgtacagcaattaaatcgaagcgatctaccgcacgcagaatgccggtcggcgtggaggaagccattgaaggaatgagcgtgcaatacagcgccgccagccaaaagctttggtcatccagacctaatgaatgggaaaggaatggcagtaaggcaatgccgccgacaatcgccaccgcgccgctgacgatatccagcgagaaggaaaatgagacgacattgcgaaattgctgcggattattgttggtcaaggctggcgttccgtactgaaccaccagctgccatgtctgaaacttaataaaatcgctgatcgacttggcgtacgattgcacaatcaccagtacgccaaacatggcgggcgtcatccctttaccggcacacgagagcgccaacagccccagcaaggcgctcacgacattactggagcctaaccaggcgctattgcgaataatggtgcgaaacgcgccatctgcaaaccaatgtttgatgttaaaacccgccaattcagcctgaccttatcgttgatagtaaaaagtatcccgccagccttaagttaaacttcggcggtcagaaacgatggcaaccagagaaaccgccttctgtgcctgttccagcacttcgctgtagggcgctctggaatcaatctcaagaatttttgtgccgttatagccaatcttcgacatgacaccgattttgtcctgcagctcggcatagtcatggtcaggcttgcgggagatggcagtctcaatatcaatgcccaggcgaataattaattccgggcgatattgcgccatttgttggtataaacgccgttcgcgctgcgccagaaacatgctgattttcccggtcgcacgttcgacgccaatccccggtccgtcgtaataaaagcccgaaatttcagcctgcgggaagcgatcgctgaccaccagaacgccactttgcgccagtcgctgaaccttgcgtagattcgccattcttcgcagcgagaagcagtacataatcaccgccgcccatagcgccggagatttggttttcatgctttgggttttcgaggatttggccgccagtcgccgttccagccagacgccaaccaacggtaatcgtttgattttgtcgccgtcttcgcccgagagcagccccagatagcgccgctcggtttgccagtgctgttgcaatgatttcaccagatcggtggtcagcgtggatttaccggtgccatcgcacccgaccaccgcaattagccccggaatgtagctgggctgcggcgcggttgtactattaacagtttgtgtttgtagtgcatccattcgttaaatcatcccctatccattttggtgatcaggaaagcgcggcgtgaattgcacgtagtgacgcttgcaggatttcatcggctggttgccgaccatccagttcaaggatcctggcgccgttgaaagtcagttgcggcgtaacggcgattttttcctgtaacgctgccagttggtggtcaggtttacgcgcaaacgcggtttgttcatcaatgccaagacgaatcaacaatacgggcaaataagatgccatccattggtacagcttcagctcgcgctgccttaacatttttatccaaccgttaccgcccgtggtttttgccaattgcgggccatcaaagcgaaaacccggcacttcaacctgcgggtagcggtcggtgatgagcagaaagccttgctggcttttacacaacattttgcgaaacttgtacgcccgccagcaggaaagcagatagataaccagagcagtaatattgccaggcggtgttgagggtttttcgtgcacatgtgccgctttacttcgcagataacgcccaaaaggtgcgccaataacagggagctgtgaaatccattcgccaattagcccggacgattgcccgagataaatgtgttctgttggcattcttgctgccagttcatttaccaggcttgccgtgagggtcgatttacctgaaccatcacatcctacaatggcaataacacgcactggcgtggaattaattattgacatattacgttgattcacgaaaaacccggcagtaaataatgtattgaatattacgtggtccgtgctcagaatatccgttcaaccttattgtgacaatggttaattgtgacattgacctgaattacgctttcataaaaacatattaaccaaataaatatttttaatggatatttaaattaaaggatatattcatgcagtcaataacacctccattaattgccgttattggtagcgatggttcaggcaagtcaacggtgtgtgaacatcttattaccgttgtcgaaaaatatggtgctgccgaaagagttcatttaggaaaacaggccggaaatgtcggtcgtgcagtgacaaaattaccgttgatgggaaaatccttacataaaacaattgaacgaaatcaggtgaaaacagcaaaaaaattgcctagaccagttccggcgctggtaattacagcgtttgtcgcccgtcgcttactgcgctttcgtcatatgcttgcctgtcgtcgtcgcgggttaattgttctaaccgaccgttatcctcaggaccaaattcctggcgcttacgatggtacggtgttcccacctaacgttgaaggtggtcgttttgtctcatggctggcaagccaggaacgtaaagcgtttcactggatggcgagccataagcctgatctggtcatcaaactcaatgttgaccttgaagttgcctgtgcacgtaaacccgaccataaacgggaatcgctggcgaggaagattgccataacgccacagttaacctttggtggtgcacaactggttgatatcgatgccaatcagccactggaacaggtgttggttgatgcagaaaaagcgattacggattttatgaccgcgcgtggttatcactagtcaaaaatggaaatgcccgatcgccaggaccgggcattttcaggaaggttaaatcaactgcaatgctatccagtacagcccaccagaaagaaaaattgccgccggtaaagtaaacacccacgccatcaggatgctggttaccgttttacgctgtaacccaccgccgtccaccaccatcgtccctgctaccgcagacgagaggacgtgtgttgtggagacaggcatcccaatataactggcaaggccgatagacactgccgccgtcatttgtgccgccatgccttgcgcatacgtcatgccgcgcttaccaatcttctcaccgatggtcatcgctacacgacgccagccaatcatggtgccaatgccgagcgccagtgctaccgccatgatgatccacacaggagcgtactcaatggtgcttaacatatcgctgcgcagttttttcagcaggttctggtcttctttactgacgcctggcagtttcgccagcttcgcggaggtatcagagatgcacagcataatgcggcgcagctggctgcgctgactcacgcttaacggctcgtaactttccatattgcctggcagcatcgttttaacgcgcgcaatcgcatcaaaggtatttgccggatgacagtgaaactctgttacttgcgtgccatcagtcgatgctgcaggcaatggaggttccatcgcaatcaacttctgcggcagttcaggatgctgttgcaggtagtgttcgaagttggtgacggcatcgcgggtacgggtaatttcatagccggacgcgttcatattgacgacgaagccagcaggggcaatccccaccagtaccagcatcaccaggccgatccctttttgtccgtcgttcgcgccgtgcgaaaacgccacgcccgcagcggaaacaatcagcgcaatacgcgtccagaatggcggtttacgtttgccttttttctttttgcgatcttccggaatgcggtgaatacggtcacgctttttcgtcccgctccagtagcgtcgcagcaggaatatcaggcctcccgcaatgaccaggccgacgataggggaaacaatcagcgaggagaaaattttggtcacttcacgcaggtttaacgcatccatcaccgatgatccggttaacagcgcgttggttaaaccgatgccgataatcgcaccaatcaaggtgtgcgaactggaggccggtaaaccgaagaaccacgttcccaggttccagataatcgccgccagcagcatggaaaagaccatcgccaggccgtgggttgaccccatattcagcaacaaatcggttggcaacatatggacaatggcataggcaacgctaagtccgcccaataacacgccaaaaaagttaaaaaatgccgccatcaccacagcaagttgtggttgcatggcacgagtataaataacggttgccaccgcattcgccgtgtcatgaaaaccattgattgcttcgtagaacaacacaaatgccagagcaagcaataacaaaagccctgtgtatatatcaaggccaacaaataaatttagcatatattagattacgccattttgaatttacgaacggacgcattatcagtgactttaacggcatgggcaaagtgaaatatcattttttaacgataaaaagagtgttatttcttgtgtatcagacaataagcattcattcaaaacctttagaaataatcaaaacacaggtattccactggttaatatattcacatatgaaataaataaatattagaacatataaatattgaatattttgattaatccccgtactgattattcttcataatcagtacggggttgctacaacatgtattactttttcaccacaattaacggttcaatatcactctcttttttgatgaccagtgattcatcaccgcgcaaacacgtcccaccgtagttgccgcccacggtgaaggtacatacctgaatgtatttaccgtccactttcggcaaacaccacagttgctgatagatgtttttctgctcggcaaatttaccgctggttttgtccagcacctcttcatgatggctgaccaggtcgatattgctaccacagcgaccggcaatcggtttcactgcgtaacctgttttcaccaattcatcattaacagtgaaatcggtatccagcaggtaacgatggtgcgggaacagcgaccagaggatcggcagaatcgctttgttgccggggatcaccgtccacagcggctcaaagactagcacttccgggcgcagcaatacgtcgataagacgcacttcgttttgcggatgaccggtacggattggcaccgcagcaaactcacggtcgctaacttcacgaatctgatcaaacgcggtttcccacgcccaggttttccacacgcagttaaccagtcgcccttccccatcaatcagttgcccggcagcatcccagcccagttcatccaatccacgcaagatacgcgtttcaaagcccgcctggtgcagcgcctgctccataaactgcgcgtgatagttttcctcgatatctttgtcctgcatgatatggacaaacggacgtgcacgactgtgtttccaggcaccagccaattcgttaatcagcccttccgccggattgaagccgttgcctttatagccctgctccgcccaacgttcgaggatcaagcccgcttcggtatgacaggaggcggagtcggcgttgtactcgtaaaccttcaggccacgctcatccatgcagaaatccatacgaccagtgatcatatggtgacggcgacgctgccaggagagacgcaaacgtggccagaggattttcgggatgtcgaacagcgccagcaggttgtcatctttcagcaccttgtcggttgcgtgaagatacatcaggtgcagctcgttggtggctttaattagctcctgctcggcactctcggtaatggtgtagtaatgataaggatcctgattgatcacctgaccgttggcctgcacataggcgttttgcagcggatctttttcatccagccatttaccgtcaaactggcctttgttttccaggcgcgctccgctgattttcagcagctcgcctgcaatttccggctgcggtaagctgtattcagtatcttccgtctggatcatccagcccagaatggtggtgtcatcaaaagtgtctttcagggtatagcagccgttttcgaccaccatctccagctcacgcgtccactgttgcccttgcggcaacggggaatgaatcacgttctgttccgcaatacggactttgttgccatgcaattgggtaatgatggcgacatggccagtgtctttaaattcaccgcctttatcccagataagaagcgcacccgcgaccggcgcacgcggcgagccgttaggaaatgcctgcaatggcaggatgttgtcattaaccacttctcgcaggaagcgcagcgagaaaatctcccacgccatacccacgtcagtaaagaccacaccgtaattcagaaagagaaaacggcgagcaaattcaacgcattgccacttgtggcccatatattcgtcgtcgatatagctacggaatacggcgtcatcttcgtattcctgcggatcgagagaactgtaatctgaagagtagattgctaccccacctggggcgtagcccaataatgtcccgaacggggcatcctggctggtcgttcctttgctcatcactttacctttaacaatacaacctaagcagttggcgtaattgttgtgctctgattacctgctcagcgacattaaccggacagaggtcagactaatcatacacctcatcgcagcggctggcgcaaagggttaaaaaattcacattctgtacagcaagtgacctgctacactgcttcaacactaccactcagaaggcaactcactatgacagacaatacttatcagcccgcgaaagtctggacgtgggataaatccgctggcggcgcgttcgccaatatcaatcgcccggtttctggtccgacgcatgaaaaaacgctgcccgttggcaaacacccattgcaactttattcgctgggaacgccgaacggtcagaaagtaacgattatgcttgaggagctgctggcgctgggcgttactggtgcagagtacgacgcctggctgattcgtattggcgatggcgatcaattctccagcggctttgtcgaagtgaacccaaactcgaagatcccggcgctgcgcgatcatacgcataatccgccgatccgcgtgtttgaatctggttcgatcctgctttatctggcggagaaatttggctacttcctgccgcaggatttggcaaagcgtactgaaacgatgaactggctgttctggttacagggcgcggcaccgttcctcggcggtggttttggtcacttttaccattacgcgccgatgaaaattgagtacgccatcaaccgctttaccatggaagccaaacgtctgctcgacgtgctggataagcaactggcgcagcataagtttgttgcgggcgatgagtacaccattgcggatatggcgatttggccgtggtttggcaatgtggtgttaggcggcgtgtatgatgccgcagagtttcttgatgcgggcagttataagcatgtacaacgctgggcgaaagaagtaggcgaacgtccggcggtgaaacgtgggcgtattgttaaccgcaccaacggaccgctgaatgagcagttgcatgagcgccatgacgccagtgatttcgagacgaatacggaagataagcgtcaggggtaagggttggtgttcgtcgcagcaagccatccaagccggataaggcgttcacgccgcatccggcaatcgtgcacaatgcctgatgcgacgctgccgcgtcttatcaggcctacgaaagctaatcatcacgcgctggtaatgtcgtaatccatttggcgcagtgcgtctaatgtggctttggcttcatcttcgtcgatgatgctcatggcaaatccgacgtgtaccagcacccactggcccagtagatcggcagggttaccttcacaaatcagggcgatattcacgtcgcgcttgataccacatacttcaacctgcgcaagctggtgaatatcttcaccgacagccagcacctggcctggaacgccaatacacattattaactccggttattcaacttcaatacttttgacgatcagcgaatcgccggtatcgacacgcaaccgctcgccgtgacagagcggacactgcgcatcgtgctgatgaatctccaccacctggctgcaatcccagcaccaagcctgggcgggtttatagacgatatgtaaatcgcacccttgcgccaccgttccgtggcagacaatttcaaaactaaaacggacggcgctctcctcaacgcaggagagcgcgccaatttccagccacacggcggtgacgcgcttaacatcgtgctgctccgcctgccgttggataatttcaacggcgctctggcaaagagacaactcatgcattttcgccactcctgcgaccaaacagcagggcgcgacgccctgcgtgtggtacatccggattcgtgactggcagcgaaaggatcattcgtgcgcagtcatccgtcaggcgttggccctcttcaatcgacatgctgtgcgaaagcggcgacatcagcgaacaggagagatattgcgaaacaccgtccagttcgccaacggtaaaggtcatagtgccatacggcagttgcagaccaattttttcactcactttgcgcagcggccagagttgatccgggccggggaagataactgcactcagcatccacggggtgatcacacaccccgtccactgaccttcgaacagcgtaaaatcagaaacatacaccggcattgaaggatgcagaaaagagagatcgtgcatcgaacgccgggcaatttcttcaaacgctgcctgtacttgcgccttcggggaggtctggaaacctgctatctcttcagtcatgaatcgcctcccgtgggatggcttccacgcctgattcgcgcagcgcagccagaacctgctcaagcgcaggttcaatcattgcttcaaccgtcggcgttaagccgatgtgtggctccagcgattccgggatcacgccgaccagggtcagctttttcggaaactcaccggtgaagcgcagggccgacaatacgtcggccaggccaagctgatgcggagagattttgttggtaaacaacgccggaacttcttcatcccgcaggatcatcatcgttcccggcgtgttctttttcgacacaatggcatccgcaataatcagatgatcgcgatttgccatgtcgccaagcagctccattcccgccgtgccgccatcgaggatctcaacataatccggcagaatgtatcgttgctctaacgcttcgacaatccgcacaccgatggcttcatcggtcagcaaaatattgccgacccctaagactaaaatacgcattacagaaccttcactgaaaccacttcgttgccgtcggcatccactacgtgtaccgcacaggccatgcacgggtcgaaggagtgaatggtacgcaccacttccagcggtttattcggatcagcaaccggtgtacccaccagcgactgctcgtaaggaccgacgtcatcattgaagttacgcggaccagagttccaggttgatggaacaactgcctggtagttactgataataccgtctttaataaccatccagtgagagagcataccgcgcggcgcttcgaggaagccaacacctttgaactcacccgttgccggaatgttcggtttcacaaaggtggtgtgatcgcctttgccgatattggtgatcagtgcactgtattgattttgcaggatatcctgcaattcgcagcagtgaacggtacgaccaataatacggcccagcgtggagtgcagctgcgccacttccagcgtgttgccagtcagtttctgataaatcgcaacgatttcattcagtttgttctgggtagattcgcgacctgccgccagtttcaccagcatattagccagcggacccacttctaccgttttgccgtagaaagtcggtgatttcacccaggaatatttcccgtcgtcagaccaaccatcataagccggaatggtggtaccttcccacggtgcctgcggcgcttcgtctttataccaggagtgcttcgcgctttcctgaatgcctttgatcaggtattcatcggaatgagaagtgatcggacgatacgaggacagatccgcattctcaatgtagccgcccgggaacaggaagctgccgtttttactgtcggtcgggaattccggcacgctcaggtagttcaccgcacctttaccgcgcgtcagccattccgggtagaacgcggcaataactgcggtatcaaccttataaacctgttcaacaaagtcgctcagcttgtcgatgaaagacttgatgtacatcaggcgctcaaggttcagcacgcccaaaccgtcgaggttgatcgggttcgcgacaccacctaccgccaggttctgaatgtgcggcgttttaccgcccagcagcgccacgacgcggttagcgtcacgctggcactccagcgcctgcaggtagtgcgctaccgcaatcaggttcacttccggcggcagtttcatcgccgggtgacccccgtagccattggcgaaaatacccaactgaccgctggcaaccagatctttgatcttgttctgaactttagtgaactcttccggactgttcagatgccaggtcgaaacgcctttcagcatttcggaggctttggttgggtcagcttgcagtgcagaagtgatgtccacccagtccagcgccgaaagctgatagaaatgaacgatatggtcatgcgtggtgtgcgcagccagaatgatgttacggatgtattgcgcgttaaccggaacgtcgatattcagcgcactttctgccgcacgaacggaagacagcgcgtgagtggtagtacatacgccacagatacgttgcacaatcatccatgcatcgcgcggatcgcggtttttcacgatctcttccatgccgcgccacatggtaccggaagcccatgctttcgaaacgacgccattttcgatttcgcaatcgatgcgtaaatgcccctcaatacgggttaccggatcaatagtaattctctggctcatgctttgctcgcctcatgacgattatgatcgttttgttttaaaggaggaagtatcggcagtagacgaatgagtacgatgtaagcgcaaatctcaatagccacaaaaccaatagaaatcaacagttcttcccaggtcgggaagtaggcgtaaccgccgcccgggttgaatgccaccagcgaataggtcagacgccaggttgcacaacctaacagtgcgctcagtgctgacaggaacagcatgcgggaatcattacgcagcttcgccacacgcagaacgaccagcgggaagagcatcagcaggacttcaatccagaacatcacggagtagaagtcaccggcaaacgctaacgacagcttgtcgcgatagataagctcgccaaagcgcagcacgatgaaaatcgccagcaacacactgatggtgttggtcagcttgacgaacagactcttttcatccggaccgttgccacgcagacccgcctgcaccagcgaaccttcaaagatgacaatcgagaagcccatgatgaacgccgtcagcagcgagaacagcggcaacatttcatagctctgccacaacggatgcaccttgtagcccgccgagatcatcagtgaccccattgaagactggtgcatggtcggcaacagcgcgccaagtgcaatgatgaagaacataaccttgttcagacgcttgagagaaaccttccagcccagacgttcaaacagtgccggagcaaactccagtgccatcacgccgatatagatggtcatacagaccgccgtctcgaacagtaccgagttcacgttgaagtgacccggaatgtagaagtacggcaggttccagtagcgacccacgtcgatagtgatcgacaagccacccagtgagtaaccaaacagactcgccaacagcgccggacgcaccagcggatggtattgcccacggttaaagacgtataccgcccacgccagcgcccagccgccacaggcaaagccggtgccaatcagcaggtcaaacgcgatccacacgccccacgggaagccgccgttcaggtcagagacagagcccagaccgaacaccagacgcttcacaatcaggagcatacagatgacgattaacggtccaaaaatcatgaccggtttactgatgattttgccgcccagcggttgtggatcatgactcatgatcgtctcctccgtcgtgatggtcgtttttggtgttgcgacgaaccagcacggttaagcccgccagcacagccagtggtagcatcatgcctttatacagggtgtgttgaatattttcggaacgcgcaccggtagaaagatcgtccagtttcggcaggtcgagattttcataaggcacacccgtcagtaccagaacctgagtaccgccgccctctttctcgccgtacagatgcggataatatttcggcaccgtatgcaggtaagtgtcgccagatttcagcgtctgacgcggatagtggtattcgctgccaggcttcagcgccagacgttttttcgcctccgccatcagctcttcacgcgtaccgaaaatcaccgcgcccgccgggcacacttctacgcagccaggcagaccgcctttatcgagacgttccacacctttctggttgcacagctcgcacttatgcagcgcaccaaacgggttgttgtagtcgtacttcggcacgttgtacggacaggcgaccatgcagtaacggcaaccggtgcacacgtctttgtcgtaatggacaatgccggttttcggatcttttttcagtgcagagaccgggcacacagagacacagttcggatcgacgcagtgcatacactgtttcttaatgtacgcgtagccgttctcctcctggtctttgttgacccctgtgccgctggtccacacctgaatgatgttattggtatacggcgacagtttgtcgttgttcgaccaggtctgttccccttgcgggttacgttcagggaagttgatatcctgacacttggtgacgcaagcctggcagcctacgcacaaggtcgagtcgtacaacatccccagcgatcccggaattggcgggcggttttcagcagccgcatgactgacagacggcagcgcgcccgtcagcaatgccccgcaggaggctgctttaataaaattacgtctgttcacggttattctccccgtgagtcagcgttatctttcttttgctgacgacccagttcacgcaccgccatcacgctgacaccggcaaccagcccaaccacaccgccgagcaaaccaatagcgcctgcagagacgttgccgccctctttagcgttaacatccggtttctgtgaacgcggagtctgattttcgacgttggcaagctgatggatgcctttatggaagccgataccttcttcgttacagccatagcatgggtgaccaatcgctaccggccacacgccgccaacatcgcagaattgcagcgttgagcagttgccgtaagtttctggccctttacagccgaggtggtacaggcaccagccttcacggtggccttcatcaccgaactctttggcaaaacgaccagcatcgaagtgcgggcgacgttcgcagtgttcgtgaatcagacggccataggcgaaggtcggacggtttttgtcatccagtttcggcggtttgccgtaagtgatgatgtgcgcaacggtcgcgaggaagttgtgcgggttcggcgggcagcccggaatattgataacggttttgcctggcagaacttcttgcaggctgactgcgccagttgggttaactccagctgcggcaacaccgccccacgcagagcaggaaccgatagcgataatcgctgctgcgccttctgccgctttgcggatgtgatccacaatcggctcaccagcaaccatgcaataaataccgttatcttttaatgggatggaaccatccacaaccaacacatactgccctttgtacttctcaagtgcgttatgtttgttctcttcgacctgatgaccgaaggcggcggaaagcacttcgtgatactccagagagatagtctccagcacgaggttttctaccgttggatgcgttgcacgaagcagagattccgtacaaccggtgcactcctgcgcgccaatccagataactggcggacgctgcgggttagtaaccgattcggccatctctgcagcggctttgctacttaaccccatggtggcggctaatgctgcacaaagcttcatgaaatcacgacggttaatgccgtgagaatggatgagggtgttatctccagtcatttatagttattccgttgcgaagacctggcatatattttgcctcaatcgcaaaatcaataatgcgatcgatgcgccatttaccacacatttattatggttatcgatatcatgatactgcggcggggcgctaaaacgaagggaagaagcattagtgtaattaattaaagcaagataatacgtatgtttgatcaattttcgaggcgataaccggccataaaaaagcgcaacgtagaacaggaattattctcacgaaagaaatccattaccatctctttatccagtccatagcggcgcgtcagaatacccgcttcccaggcgctaagctggcgatctccggtcttttcgtacatccggtgtgagtagcctaatacaaaaccgcgtttataatcggcacagaattttgtcacattaaccgcactgtcggcatgcgttgcttttaatcccgccattaagcctttaccaaaatggttattcatcgttcacctcattcgctatatatcgccatatatagcgatattttaggcaaagaacgacttttgcgcacgctattttttcatgcttgtttaagacgtaatccagtaagagataaacctatcaggagagatatttatcgaaccatttcagtgtcctttgccaggcaagatcggcggcagatttgtcataacggggcgtggaatcattatggaatccgtgattaacccccggatagatatacgcctcataaaccttattattggctttcaacgccgcctcgtaagcaggccagccctcgttgattcgggtgtccagttccgcgaagtggagtagtaaaggcgcttcaatcttcgccacatcggcagtgggtgcctgacgaccataaaacggcaccgcgcaggccagttccggatacgcgacagccgccgcgttcgatacgccaccgccatagcaaaatccggtaatacccactttgcctgccgcttgtggatagcgttgcataaactcaattgcggcaaagaaatcattcatcagtttggttggatcaacctgctgttgcagctcacgacctttatcatcatttcccggataacctccaacggaacttaagccgtcaggtgccagggcgatataccccgccttcgccactcgccgtgccacatcttcgatatacggattcagtccacgattctcatgcaccaccaccacggctggcgttttgccgctcatttttgcgggtttcaccagataaccccgtacctcgccgtgaccatttggcgaaggatacatgatgtactcagcaacaatctccgggtcggtaaactctacctgagtcgccagcgcataatttggcttgagcaaatcaaacaacgctaatgccgtcatcccgcccaccgcatacttcgccgcaaggttgaggaactcacgtttcgaaattttcccgtgagcgtaatagtcgtagtaatccaacaactcttgtgggaaatctttggcggttaaacgcggcatcgttgcactcctcagttggtgtttttttaagcaaagcataagcacgtgtttttgcccagtttttcgtcactctgtgagccagactacgggatacgcgctggcgaatcgctaaactagaaacattgtttcgaaattgaacggtggaaaggagaggtcatggtctggttagcgaatcccgaacgttacgggcagatgcaataccgctattgcggaaaaagcggtttacgcctgcccgcgttatcgctcggtttatggcacaatttcggtcacgttaacgcgctggaatcacagcgtgcgatcctgcgtaaagcgtttgatttgggcattacgcactttgatttagccaacaattacgggccgcctccaggaagcgcagaagagaactttggtcgcctgctgcgggaggattttgccgcttatcgcgatgaactgattatctctaccaaggctggctacgatatgtggcccggcccttacggctctggcggttcacgtaaatacctgctcgccagcctcgaccaaagcctgaagcgtatggggcttgagtatgtcgatatcttttactctcatcgcgtcgatgaaaatacgccgatggaagaaaccgcctctgcgctggctcatgcggtacaaagcggtaaggcgctgtatgtcgggatctcctcttactcgccagagcggacgcaaaaaatggtcgagttgctgcacgagtggaaaattccgcttttaattcatcaaccttcgtacaatttactgaaccgctgggtggataaaagcggcctgctggataccctgcaaaataacggcgtgggctgtattgcctttactcctctggctcagggattgctgaccggaaaatatctcaacggcattccgcaagattcacggatgcatcgtgaagggaataaagttcgtggtctgacgccgaaaatgcttaccgaagccaacctcaacagcctgcgcttattgaatgaaatggcacagcagcgtggacaatcaatggcgcaaatggcgttaagctggttgctgaaagatgatcgcgtgacgtcggtattgattggtgccagccgcgcggagcaactagaggagaacgtgcaggcgctgaataatctgacatttagcaccgaggagctggcgcagattgatcagcatatcgccgatggcgagctgaatctgtggcaggcgtcgtccgataaatgacctgttaataacgggcgcgcgaaccgcgcccgaatcagatcagtgattatgacgagtcagtcggtcaagatagcccatcacaaatgcagaaagcacaaacgtcagatggataatgacgtaccacatcagtttgttatccgggacatttttcgcatccataaagacgcgcagtaagtgaatggaagaaattgccacaatcgacgctgctactttgtttttcagcgacgttgcgtccattttccccagccagttcagcttctctttgttctcggagatatccagctgtgagacgaaattctcataaccggaaaacatcaccatcaccagcaaaccgccaaccagcgtcatatccaccagcgacagcaacacgaggatcaaatctgattccgccatcgagaagatattcggcagtacgtgaataatctcctggaagaacttcagcgccagggcaactaacgccagcgaaaggccaaagtacacgggggcaagcagccagcgagaagcatacattgcattttcaagaaaacgttccatacattcctgtcgtgtagttaaaacgggcaacagtatatcgcaattgagtaaacagcacgcaacagcaaatcaacatatacgttaaacctttgtcgcataattctgaggtttagggatcttcctggttcccttatcaacgcatcgagagcgtctacccttaaaggacgttgaacctgaagggagaaaaacgatgtctcatttaaaagacccgaccacgcagtattacactggtgaatatcccaaacagaaacaaccgacgccaggcatccaggcgaagatgacaccggtaccggattgcggcgagaaaacctatgttggtagcggtcgcctgaaagatcgtaaagcactggtgacagggggcgattccggaataggtcgcgctgccgccatcgcttacgcgcgtgaaggggctgacgtggcgatcagttatcttcccgtggaagaagaagacgctcaggatgtgaaaaagatcattgaagaatgcggacgcaaagccgttctgctgccaggcgatttaagcgatgagaaattcgcccgttcgctggttcacgaagcgcacaaggcgttaggcgggctggatattatggcgctggtcgccgggaaacaggttgccattccggatattgcagacctcaccagcgaacagtttcaaaagacctttgccattaacgttttcgcgctgttctggctaacccaggaagcgatccccctgctaccgaaaggtgcaagtatcatcaccacttcgtcaatccaggcataccagccaagtccgcatttactggactatgcggctacgaaggcggcgattctgaactacagccgtggcctggcaaaacaggtcgcggagaaaggtattcgggtgaatattgtcgcgccaggccctatctggacggcactgcaaatttccggcggacaaacgcaggataagatcccgcagtttggtcagaaaacgccgatgaagcgtgcggggcaaccggcggaactggcccctgtatatgtttatctggcaagtcaggagtcgagctacgtcaccgcagaagtgcacggcgtgtgcggcggcgagcatttaggttaaaaaaatgcccggttgtgaaaagcaaccgggcatcattgtgaattcactcttacctgatgtggcgaaaacgccttatccggcctacaaacgcacgaagattcaacatgttgcaatagattttgtaggcctgatgagcgtagcgcatcaggcaattctactttacttcgctttggcggtttcttcgccgaccagacctatcttcaggtaacccgcctgatgcagcgtatccattaccttcatcaacgtctcgtaatcgacggttttgtccgctcggaagaagatggtggtgtctttcttgccttcggttaacgcattcaacgccgtaatcattgtttcatcggtgaccggatcgttaccgataaacatcgagttgtctgccttcaccgacagataaaccggtttttccgggcgcggctgcggcgtgctggtagaagcaggcaagttcaccttcacatctaccgtcgctaacggtgccgccaccataaagataatcagcagaaccaacatcacgtcgataaacggcgtcacgttgatatcatgcatttcgccgttatcgtcgaggttttcgttaagatgcattgccatcggacattatcctgcgcgtaatttttgtgcgacacgaaccggatgcgcagcggcgctggcttccagatccaggtcacggctttgcagcaacaatacctgcgctgcaacatcacccagcatcgctttaaagccgccaatctggcgtgcaaatacgttatagataacgaccgcaggaatcgctgccacgaggccgattgccgttgctaacagagcttctgcgatacccggcgcaacgactgccaggttagtggtctgcgtttgcgcgataccaataaagctgttcatgatgccccagaccgtaccaaacagaccaacgaacggagaaatcgcgccgatggttgccagatagccgttaccgcggcccatttgacgacccactgcggcgacccgacgctccagacggaagctggtacgttctttaataccttcgttatcgtcgctgccttctgacagttccagctcattctgcgcttcattgagcaaatgcaggcttaagcttttgctaccaaaatcagcggcgatatcgttggcctggtttaaggaacgcgcttcagccagcagttgctgctcgcgcttaaggcgacgcttctgattgaagaactctacgctcttactgaagaagattgcccaagtgactacggaggccaaaataagcccaatcatcacgcacttaacgacaatatcggcgtgctgatacataccccagacggaaaggtccgtctgcatcaaattattacccactgtgtatctccaggacgcaagtcacaaaatctgcgcataataatatcaaaatgacgtcgaattgatagtcgttctcattactatttgcatactgccgtacctttgctttcttttccttgcgtttacgcagtaaaaaagtcaccagcacgccatttgcgaaaattttctgctttatgccaattcttcaggatgcgcccgcgaatattcatgctagtttagacatccagacgtataaaaacaggaatcccgagatggcggacaaaaagcttgatactcaactggtgaatgcaggacgcagcaaaaaatacactctcggcgcggtaaatagcgtgattcagcgcgcttcttcgctggtctttgacagtgtggaagccaaaaagcacgcgacgcgcaatcgcgccaatggcgagttgttctatggacggcgcggaacgttaacccatttctccttacaacaagcgatgtgtgaactggaaggtggcgcaggctgcgtgctatttccctgcggggcggcagcggttgctaattccattcttgcttttgtcgaacagggcgatcatgtgttgatgaccaacaccgcctatgaaccgagtcaggatttctgtagcaaaatcctcagcaaactgggcgtaacgacatcgtggtttgatccgctgattggtgccgatatcgttaagcatctgcagccaaacactaaaatcgtgtttctggaatcgccaggctccatcaccatggaagtccacgacgttccggcgattgttgccgccgtacgcagtgtggtgccggatgccatcattatgatcgacaacacctgggcagccggtgtgctgtttaaggcgctggattttggcatcgatgtttctattcaagccgccaccaaatatctggttgggcattcagatgcgatgattggcactgccgtgtgcaatgcccgttgctgggagcagctacgggaaaacgcctatctgatgggccagatggtcgatgccgataccgcctatataaccagccgtggcctgcgcacattaggtgtgcgtttgcgtcaacatcatgaaagcagtctgaaagtggctgaatggctggcagaacatccgcaagtagcgcgagttaaccaccctgctctgcctggcagtaaaggccacgaattctggaaacgagactttacaggcagcagcgggctattttcctttgtgcttaagaaaaaactcagtaatgaagagctggcgaactatctggataacttcagtttattcagcatggcctactcgtggggcgggtatgaatcgttgatcctggcgaatcaaccagaacatatcgccgccattcgcccacaaggcgagatcgattttagcgggaccttgattcgcctgcatattggtctggaagatgtcgacgatctgattgccgatctggacgccggttttgcgcgaattgtataacattgccacttttggacaattttgcagacatttaattgtgaaaagtcttaaattgttgcgtccgggatcaaggcgtcccggacgaatcaggagtacaataggcagataaaggcttaaacgctgttccacaggaaagtccatggctgttattcaagatatcatcgctgcgctctggcaacacgactttgccgcgctggcggatcctcatattgttagcgttgtttactttgtcatgtttgccacgctgtttttagaaaacggcctgctgcccgcctcatttttgccaggcgacagcttgttgatactggcaggcgcattgattgcccaaggggttatggattttctgcctacgattgcgattctgaccgccgcagcaagtctgggctgctggctaagttatattcaggggcgctggttagggaataccaaaacggtgaaaggctggctggcacagcttcctgctaaatatcaccagcgcgccacctgcatgtttgaccgccacggtctgctggcgctgctggctggacgttttcttgcatttgtccgtacgctgctgccaaccatggcgggaatttccggtctgccaaaccgccgcttccagtttttcaactggttaagtggattgctgtgggtcagcgtggtaaccagttttggctatgccttaagtatgattccgttcgttaaacgccatgaagatcaggtaatgacgttcctgatgatcctgccaattgccttgttaaccgctggcttgttaggcacgctgtttgtagtgattaaaaaaaaatactgtaacgcctgacgattttccccgttcccggctgctgtaccgggaacgtatttaattcccctgcatcgcccgcattcttgccgcatcttcccccggcgtcacaccgaagtaacgtttaaactcacggctaaattgcaatgcgctttcatagtcgacgcgcatcgctgctgcgctggccttcatgccgtcatggatgatcatcatccgcgccttatgcagacggtaattcttcaaatactgcaacggcgaggtgctggtgacagacttaaaattatgatggaacgccgatacgctcatgttggcttctgccgccagttgctcgacgctcaggttttcggtgtatttattctcaatccgtttcagcacgcggctaatcagactgaagtgagtctggcgactgaccagcgccagtaacgcgccgccgcaaggtccggtcagcacgtagtacagaatttcgcggatgatctgtttgccgagaatacgcgcatccagtggtcgctccatcacgtcgagtaaccgctccgccgcgcataaaatctcttctgataacgtggcggagttaatcccgctggctgccatcgacggctggaaatgctcatcttcgccaatgtccatcaacagttcctgtaactgcaaaatatcgacattgagacgcaatcctgccagcggcacctctgacgtggcataggtttcgcactcaaacggcaacggcaccgtcagcagcaggtattcattggcatcataacgaaacacgcgttcattgatataaccgattttatgcccggaaaagagaattatgatgccaggctcgtacatcaccggtgtacgtgcgaaaggcgtctcgccatacaacaaacgcacatcgggcaacagttctgacaaactattttctttatttttcagtttattaactttatccgccagcaagcggcaaatctcttcacgtttcatatcgcgtaatttcttaggaataatgcggcaatttgattgtgcgcaattttgtagcatttctccagcactctggagaaataggcaagacattggcagaaatgagcattgagagccagggcgctggcgatcacaatgaaaaacatcaggcagatcgttctctgccctcatattggcccagcaaagggagcaagtaatgaacaactttaatctgcacaccccaacccgcattctgtttggtaaaggcgcaatcgctggtttacgcgaacaaattcctcacgatgctcgcgtattgattacctacggcggcggcagcgtgaaaaaaatcggcgttctcgatcaagttctggatgccctgaaaggcatggacgtgctggaatttggcggtattgagccaaacccggcttatgaaacgctgatgaacgccgtgaaactggttcgcgaacagaaagtgactttcctgctggcggttggcggcggttctgtactggacggcaccaaatttatcgccgcagcggctaactatccggaaaatatcgatccgtggcacattctgcaaacgggcggtaaagagattaaaagcgccatcccgatgggctgtgtgctgacgctgccagcaaccggttcagaatccaacgcaggcgcggtgatctcccgtaaaaccacaggcgacaagcaggcgttccattctgcccatgttcagccggtatttgccgtgctcgatccggtttatacctacaccctgccgccgcgtcaggtggctaacggcgtagtggacgcctttgtacacaccgtggaacagtatgttaccaaaccggttgatgccaaaattcaggaccgtttcgcagaaggcattttgctgacgctaatcgaagatggtccgaaagccctgaaagagccagaaaactacgatgtgcgcgccaacgtcatgtgggcggcgactcaggcgctgaacggtttgattggcgctggcgtaccgcaggactgggcaacgcatatgctgggccacgaactgactgcgatgcacggtctggatcacgcgcaaacactggctatcgtcctgcctgcactgtggaatgaaaaacgcgagaccaagcgcgctaagctgctgcaatatgctgaacgcgtctggaacatcactgaaggttccgacgatgagcgtattgacgccgcgattgccgcaacccgcaatttctttgagcaattaggcgtgccgacccacctctccgactacggtctggacggcagctccatcccggctttgctgaaaaaactggaagagcacggcatgacccaactgggcgaaaatcatgacattacgttggatgtcagccgccgtatatacgaagccgcccgctaagctttttacgcctcaaactttcgttttcgggcatttcgtccagacttaagttcacaacacctcaccggagcctgctccggtgagttcatataaaggaggaacgtatggctaatccaaccgttattaagctacaggatggcaatgtcatgccccagctgggactgggcgtctggcaagcaagtaatgaggaagtaatcaccgccattcaaaaagcgttagaagtgggttatcgctcgattgataccgccgcggcctacaagaacgaagaaggtgtcggcaaagccctgaaaaatgcctcagtcaacagagaagaactgttcatcaccactaagctgtggaacgacgaccacaagcgcccccgcgaagccctgctcgacagcctgaaaaaactccagcttgattatatcgacctctacttaatgcactggcccgttcccgctatcgaccattatgtcgaagcatggaaaggcatgatcgaattgcaaaaagagggattaatcaaaagcatcggcgtgtgcaacttccagatccatcacctgcaacgcctgattgatgaaactggcgtgacgcctgtgataaaccagatcgaacttcatccgctgatgcaacaacgccagctacacgcctggaacgcgacacacaaaatccagaccgaatcctggagcccattagcgcaaggagggaaaggcgttttcgatcagaaagtcattcgcgatctggcagataaatacggcaaagccccggcgcagattgttatccgctggcatctggatagcggcctggtggtgatcccgaaatcggtcacaccttcacgtattgccgaaaactttgatgtctgggatttccgtctcgacaaagacgaactcggcgaaattgcaaaactcgatcagggcaagcgtctcggtcccgatcctgaccagttcggcggctaacatgcaaattctcccggtgacggtaatgttccgctaccggacttttcagaaatcatttattcccctcgcgtcccgcccgttgttactcttccttgttcaggaatgccaaatataaggacatcatcatgcagagccggaagctcttaaaagaacaactcatctatatccgggataaacgcaacggagaggtgaaaaacagatgaaaataatacttctgtttttagcagccctggcaagttttaccgtacacgcgcagcctccttcacagaccgtagaacaaacagtccggcagatttatcagaactataaatcagatgccagtacaccttatttcggtgaaaccggagagcgggcgataacttcagcgcgtattcaacaggcgcttaccctgaacgacaatcttacgctgccgggcaatattggctggctggattatgatccggtttgtgattgtcaggattttggcgatctggtgctagaaagcgttgcgataacccaaactgacgccgatcatgccgatgccgttgtgcgctttcgtatctttaaagatgataaagaaaagaccacgcagacactgaaaatggtggcggaaaatggtcgttgggtcattgacgatattgtcagcaatcatggcagcgtcttacaagcagttaatagcgagaatgaaaaaacgctggccgctttagcttcgttgcaaaaagaacagccggaagcctttgttgccgaactctttgaacatattgctgattatagctggccgtggacgtgggtggtttccgactcttaccgccaggcggttaatgccttctataaaaccaccttcaagacggccaataatcccgatgaagatatgcaaatagaacggcaatttatttacgacaatccgatctgttttggcgaagagtcgctattttcacgcgttgatgaaattcgagtcctggagaaaaccgccgattccgcccgcattcatgttcgttttacgctgaccaatggcaacaacgaagagcaagaactggttttacagcggcgcgaaggcaagtgggaaatcgctgattttatccgcccgaacagcggcagcctacttaagcagattgaggcaaaaaccgccgccagattaaagcaatgagctgaattaaataacaattagccggaacaataaataaaagggaacactatatgaaaacgattttcaccgtgggagctgttgttctggcaacctgcttgctcagtggctgcgtcaatgagcaaaaggtcaatcaactggcgagcaatgtacaaacattaaatgccaaaatcgcccggcttgagcaggatataaaagcactacgcccacaaatctatgctgccaaatccgaagctaacagagccaatacgcgtcttgatgctcaggactattttgattgcctgcgctgcttgcgtatgtacgcagaatgataaaaaaatccccggcagcatgtcagttgccggggattttttttaacgtccaaccgccgctttagggcgtttcttcgcaccagcattcaccggacgagattgcgtagacgacgctttttttgccgtagcaggcgtctgacgctgggtcgccatcggcgtatgtttagtcaacgccggacgggtattgcggttctggcgacgagcttcacgcatctcttcaatggttggcgcaggcactaagcaatcgcgacggctgccaatcagatgctttttgcccatcgcttccagcgccgggcggattaacggccagtttgccggatcgtggtaacgcaacaacgctttatgcaaacgacgctgtttgtcgcccttcggtacgaagacgtcttcgctcttataaccaatcttcgccagcggttttttcccggtgtaatacatggtggttgagttcgccagcggcgatgggtagaagttctgtacctggtcgagacggaaacgatgctttttcagccacagcgccaaattcaccatatcttcatcacgcgtaccggggtgcgcagagatgaaatacgggatcagatactgctctttacctgcctgtttcgagtaggtatcgaacagctctttaaagcggtcatagctgcccatgcccggcttcatcatcttcgacaacggcccttcttcggtatgttccggagcaatcttcagataaccgccgacgtgatgggtcgccaactctttgatatagcgcggatcttccacggcgatgtcataacgtacgcctgaggcgatgaggatttttttaatgcctttcagatcacgcgcacggcgatagaggttgatcgtcggttcgtggttagtgtccatgtgcggacaaatatccggataaacgcacgacaaacggcgacaagtttgttcagcgcgtggcgatttgcagcgcaacatatacatgttggcagttggcccaccgagatcggaaatcacgcccgtaaaacctggaacggtgtcgcggatcgcttcgatctcattaatgatcgaatcttccgaacggctctgaataatgcgcccttcgtgctcggtaatagaacagaaagaacagccgccaaagcagccgcgcataatgttgaccgaaaaacggatcatttcgtaagccggaatacgggcattgccataggccggatgtggcacgcgcttgtacggcagcgcaaaaacgctgtccatctcttcggtagaaagcgggatagcaggcgggttgatccacacatagcggtcaccgtgtttttgcatcaatgcgcggacgcagcctgggttggtttcgtggtgcagaatacgcgaagcatgggcgtacagcactttatcgcccttcactttctcgaaagaaggcagcaacacgtaggttttttcccacggtttcgggcgcggtggctgcacggttacggctttggcttcctgctttttcggtgccaccggtttgttatccgcgcacggcaaatcttcaccatacggatgcgggattgggtcgatttttccaggggtatcaagacgggtggaatccacgccgctccagccaggcagcgcctctttcacgataatcgcggtattacgcacatcgcggatttcactaatcggctcgcccatcgccagacggtgcgccacctccaccagcggacgctcaccgttaccaaacatcagcatgtcggctttcgaatccaccagcacggaacggcgcacggtatcggaccagtaatcataatgtgcggtacggcgcagactagcctcaataccgccgaggatcaccggtacatctttccacgcctctttacaacgctgggtataaaccagtgtggcgcgatccgggcgcttacccgcgacgttatccggcgtgtaggcatcgtcatgacgtaaacggcgatcggcggtataacggttgatcatcgaatccatgttgccagcagtaacaccgaaaaacagattcggtttacccagacgcataaagtcgtctttgctgctccagtccggctgggcgatgatcccgacgcgaaagccctgtgcttccagcatacgaccgcaaatcgccatcccgaagcttgggtgatcgacatacgcgtcgccagtaaccaaaatgatgtcgcagctatcccagccaagttgatccatctcttcacgagacatcggcaaaaacggtgccggtccaaaacaggcggcccagtactgcggccaggagaacaggtcgcgatccggttggatcagggagatagagctcattttgcttccagaaatgataaaaaaataatcaaaggccggggattataagccggaacgaaagagaaatcgaaaagtattccatactcgccctcctcgggcgagtatgaagattacggtaccggattgactaacagttgcccaatcgagccacggtccgccatttccagcgtctgactgttgaagtagaacgggaagtgcgcccaggaaggctgaccgaaataaacaagcagctccacttgtccgtcaacccaaacggtatctttccagcctctgtcttccgggaacggcatcgcaccattcacgttacggatctggaacatcacgccttcaatatggaacgcttgcggctcgtccgcgcgtaccgtccagcgttcccacgttccttgctgcgcggtgacatcaatacggttgacgtcccacagctgtccattaatacccgggtcatcacccagactgatatcgcgactgcgaatcggcgaaccggccatgatttcagttggcagcaagcgcatcggaagactgtctgtgaccagcggcagaaggccggttgggcgcagcgttagcaccagggtagaaaccagaatactggatggctcaaagaagccgcgaatacgatcaacaatgctcgccgcttcgccacaggtgatcgacacttcatcgccgttgctcatatccaccagaatctcgcggcgctcgcccggtgccagcgaaagttgcttcaccgatacaggagcaggcaggaatccctgatcgccagaaatcacatgtaacgggcgaccatcgctcatctgtagttgatagcgacgagagttcgacgcgttcagcagtcgcaagcgcacccagccacgcgagacttcaacgtacgggctttgtacaccgttaaccagcagcgtatcaccaacaaagccgccgcttcccggttcgttgtattctggcgtaccaaagttatccagccgtttatcctggataatgaccggaaaatcatccacatcataatggttggggataggcagcgacttgctgacttcatcttccaccagccacattccggcaaggccgttatagacctgctgagccgtgcggttgggagtattggcgtgataccacagagtagctgcgttctggcgaataggcagtacgggtgcccagtcagcgtttggcgacatcatccgtgccggaccgcccatcagcgggccaggtacctgtagcccggccaccgtcattgagacattttctgtcaggcggttgctgtaaataagcttaacatcgtcgcccttccagacgcggatagtcggccccaggtaacgaccattgattccccagaccgacgcgcgtgtccctggcgtaaatgaccagtgcgcacgttgtacagtcataaacagcggttgcccacggcgagattcaagtagcggcggaacgggtagcggttgctgttgcccggctgcgctggccttcaggggaacagcgcctgcacaaagtgcaatccccgatgcctgaatgaactgacgccgactgagtgacatatttgctccatgtaaaactggctaaagtaataccgtgcaggaaagtgttccccgcaaaaatacagattgccgacttaaacttttccggcggcttcgcgttctgcgacttctttatcgagctcggcgattttttgttccattatcgaacgacaatgggcagccagctcacgaacctgatctttgccatactgactgacgtcaattggcggcagcatttcgacaatcaccagaccgttgtgcagtcgattaagattaatcttattcgaagttgtagagacgcacacgggaataatcgggacgcccgccgcaattgccgcgtgaaatgctccagtcttgaacggtagcaggccgcgaccacggctgcgggttccttccgggaacatccagatggaaatacggcgttttttgaaatgattcacgacttccgcaatggtgccgtgagctttagtgcgattgtttctgtcgatcaataagttgccggttaaccagtacaactgcccgaagaaggggatccacagcaagctctttttacctaccgtcaccgtcggcggttgcacaatgttcgatgctgtcaccatgtcatagttgttctggtggttagcgatatagatagcattgccgtagctttcagcatctgcaggtttgcggcactcaactttcaggccgaacagcggcgcaagacggccaaacatatgcccaaaggtggccacatgtttcgggttacgcgggctgaaaaggcagtaaatggagccgaatacacagactaagatgctgtaaatcacggtaataataagacgaaagatatatagcataacaccctctgaaggtctgagagactggcattgtacgtcacctgaaatcaggttagggcattgttaaaagccgctctctggaaaagcgtattgttaatcgcaacgcatgaataaacaacggtttcaagggaatttttatcgtttccgggggttgaatacgctgccggatgacgacttaacgtttcatccggcgttccttgcaagcgggaggaaacaggccctccccggcatattactcttcgctatcaccgttgctggcacggcgaggagagtcgatctcaacacgatcgatacgctgcaaaccgcgcatcaacgtaccgcggcgtccacgttcaccagtgactttctgtaactcttccgggcgcagtttaattttgcgtttcccaacatgaatggtcagcgtgctttgcggcggcagaacgtacaattgcgccagaccatcttctccacgcgcggcttctgccgatggaatgttgataatcttgttgcctttgcccttcgacagctgcggcagatcgcttaccgggaacatcaacatacggcctgcctgagtgattgccagcagcatatcggaagcatcttcaatcaccaccggcggcataacatgggcattttccggtaaggtgatcaaagccttacctgcacggttacgcgccaccagatcgttaaaggtgcagacgaaaccgtaacccgcatcggaagccatcagcagtttctgatcgtcgctttccatcagcatatggtcaacggtcgccccaggcggcaacgttaatttgccggtgagtggttcgccctgaccacgcgccgacggcagcgtaatcgggtcgatggcatagctacgaccggtggaatcaacaaacactaccgattggttgctcttacctttcaccgccgctttgaagctatcacccgctttataattcaggcccggcgcgtcgatatcatggcctttagcgctgcgtacccagcccatctgcgacagcacaatggtgacaggttcagacggcagcatgtcgtgctcgctcatcgctttcgcttcttcgcgttcctgcaacggcgaacgacgatcgtcaccgtaggcttgcgcgtctgcctgcagttctttcttcagcaggttattcattttacgctcggaagccaaaatgccctgcaactggtcgcgctctttttccagctcactctgctcaccgcgaatcttcatctcttccagtttggcaagatgacgcagtttcagttcgaggatcgcttccgcctgggtttccgtaaggccaaaccgcgacatcagcgccggtttcggttcatcttcgttacgaatgatctcaatcacttcgtcgatgttgagaaacgccaccagcaaaccttccaggatatgcaggcgcttgaggactttctccagacgatagttcagtcggcggcgcacggtatcgcgacggaacaccagccattcggagaggatttccagcaggtttttcaccgccggacgaccatccagaccgatcatattgaggttaatgcgatagctcttttccagatcggtggtagcgaagaggtggttcatcacctgatccatatccacgcggttggaacgcggcacaatcaccagacgggtcgggttctcgtggtcagattcatcgcgcagatcgtcaaccatcggcagctttttgttgcgcatttgcgcagcaatttgctccagtacacgcgcacctgaaacctgatgcggtaatgcgctgataaccaccgcgccatcttctttcttccacaccgcgcgcatacgcactgaaccacgtccgttctcgtagattttacggatctcggcgcgcgaagtgataatttccgcttcagtcggataatccggcccctgcacgatatccagcagctgatcgagcgtggttttcggctggtcgattaatgcgattgccgcctgagctacttcacgcaggttatgcggtggaatatcggtcgccatgccgacggcaataccggtggtgccgttaagcaaaatgtttggcagacgagcaggcagcattttcggctcctgcaaagtgccgtcgaagtttggcacccagtcagccgtcccctgccccagctcgctcaatagcagctcggaatatttcgacaaccgggattcggtgtaacgcattgccgcgaacgatttcggatcgtccggcgcgccccagttcccctgaccatcaaccagcggataacggtaagagaacggctgcgccatcaggaccatcgcttcataacaggcgctatcgccgtgcggatggtatttacccagtacgtcaccgacggtacgggccgattttttaaatttggcgctggcattcaggcccagttcagacatcgcatacacaatgcggcgctgaacaggtttcagaccatcaccaataaacggcaacgcacggtccatgatcacgtacatggagtagtttaagtaggcgttttccgtaaattcatgtagcgcaaggcgctctgccatatcgctcattaattctgattcctcaactgattcgccagccttcaaaggggcaatattgccggagatactacattatctgccgcgtcgagtcacaggagatcagcgtgaatagcgccgccggacgtgctccgacggcgataaaggcatcaatgtgccttgatatacaactctttgctgtagacttgatcggcatagagggcagcacaaggttgcgcccatgccacaccactcggcatgggggtccgctccgggcgattcgagaagttgaggttatgcgagtccagggaagcctaaagcatcaaagtagtcgactgtaagtatatggttcagcccagtttagctgtgtctccaccagtgccccgcgcctcctgccataagtgcggcttgctcatgggtacccccgagacggcttacggcgcaccggataataaatttcgcgtatacatggtattccttaccggagaaattataagcccaacaacaatacgcctgtggcattgttcgctcaaacttatcgcgagtgatttggctcacactccggtaaagattccccatcacgctaacggcacataaacatccgtttccagtcgctgctccgtcaccccttcggcaagattggtgtagtgaaacagaatcggtgctttacgcattttctcgccgcttgcaggcagccagtggcgaataatgccccatatcgtgtgtgaaatatcgtccagctcgccaacgtggcgggccacggcataacgtccaccggtaagttcaccattgctcacaccataacgattatcgggaatcggttcgctaacgctgccgcagatatcaaagcgaaacgcttccggtgcggtggtggcagggtcgtcccaggcgacgccaaaagtctggctttggttaacaggagaaagccccgtctctttacgccacatgataaatttcgccacactgtagttgagcaactcagggctacagcggtgcggcaacatcgccacagggattgatgggaaatcgataatgtttacatccagtgtcaggtttgtcattttgcctccctgcgaaattattcccgggaacgcgtcccgggagcggtaacaattacggatttactttgcggatctgtttgacgtcaatttcaacagaattccagtctttatcgacttcaccctgaatctcaaccgtatctttcggcgtcaccgtcacaccgttccagcgtttgtggtcgatatcaacattgatagtaccgctggcatctttaaacacgtagagatcgtcagagatgcgttcaacgatattgccgcgcagggttacccaggtgtcgtcacgcagggattttgcgctttctacagtcgttacgctgccgttcggcccctggaatcctccggcctgactttgcgttgccgatgggccagaaaaaccgccctgctctgctgccatcaccggtgcactgcacagggccattactgcgattactgctgcgaattttttcatgtttattactccctttaatgtctgtttccgagcatttaacaagatagtccttaacaacttcttaagggaaaaaaataaaatttaatgctgtacagagcgcgttacaacacggtttactggcagcaaatacggttatcgcagggatgaaaaaatgcgaattttactgatagaagatgacatgctgattggcgacggcatcaaaactggccttagtaaaatgggttttagtgtcgactggtttacacaaggtcgtcagggaaaagaggcgctttatagcgcaccttatgatgcggtgatcctggatttaaccttaccaggcatggatggtcgcgatattttgcgcgaatggcgagagaaaggtcagcgtgagccggtactgatcctgaccgcgcgtgatgcgttagcggaacgtgtagaagggctgcgtctgggagctgacgattatctgtgtaaaccttttgcgttgatagaagtcgccgccaggctggaggctctgatgcgccgaaccaacggccaggccagcaacgagctgcgccacggtaacgtcatgctcgaccccggcaaacgtatcgccacgctggctggcgaacccttaacactgaaaccaaaagaatttgccctgctggaattactgatgcgtaacgctggtcgggtactgccgcgcaaactgattgaagagaaactgtatacctgggacgaagaggtcaccagtaatgccgttgaagtgcatgtgcatcatctgcgacgcaaactcggtagtgattttattcgtaccgtgcatggtattggctacacattaggtgagaaatgaaatttacccaacgtcttagtctgcgcgtcaggctgacgctaatctttttaattctggcctcggtgacctggctgctttccagctttgtcgcctggaaacaaacaacggataacgtcgatgaattgttcgacacccaactgatgctgtttgccaagcggttaagtacgctcgatctcaacgaaatcaacgcggcggatcgcatggcacagacgccaaataaattaaaacacggtcatgttgatgacgatgcgctgacctttgccatctttacccacgacggcagaatggtccttaatgatggcgataacggagaagatattccctatagctatcaacgggaaggttttgctgacgggcaactggtcggtgaagacgatccttggcgttttgtctggatgacctcacctgatggcaaatatcgcatcgttgttggccaggaatgggaataccgtgaagacatggcgctggcgattgttgccgggcaattgatcccgtggctggtcgcactgccgattatgttaatcatcatgatggtactactgggtcgtgaactcgcgccgctgaacaaactggcgctggcactacgtatgcgtgaccctgactcggaaaaaccactaaacgcgactggcgtacccagcgaagtgcgaccactggttgagtcgctaaatcaactgttcgcccgcacacatgcgatgatggttcgagaacgacgctttacctccgatgcagctcacgaactacgtagcccgttaacagcgctgaaagtgcaaaccgaagttgcgcagctctctgacgatgatccgcaggcgcggaaaaaagcactgctccaattacattccgggatcgatcgcgctactcgtctggttgatcaactgctcacgctatcgcggctggactcactggataaccttcaggacgtcgcggagatcccgcttgaagatctcctgcaatcgtcggtgatggatatttaccacacggcgcagcaggcgaaaattgacgtgcgactgacactcaatgcccacagcatcaaacgcactggacaaccgctattgctaagtttgttggtgcgaaaccttctggataacgccgtgcgctacagtccacagggcagcgtggtggacgtcacgctgaatgccgataatttcatcgtgagggataacggccccggtgtgacaccagaggcactggcgcgaattggcgaacgcttctatcgcccccccggacaaaccgctaccggcagtggacttgggctatcgattgtccagcgaatcgccaaattgcatggcatgaatgttgaatttgggaatgcggaacaaggtggatttgaggcgaaggtgagctggtaagggtaagacttttgctaaattcgcaaaagactttgcacattttgctaattttaccgtaccgctctgtgacgtactatagtcgacaaacgtctcaccttgaggttaaaaaatgagcaacaccctgattatcaacggcgcgaaaaaattcgcccactccaatggtcaactgaacgacaccctgaccgaagtcgcggatggcacactgcgcgacctcgggcatgatgttcgcatcgttcgcgccgacagcgactacgatgtcaaagcggaagtacaaaactttctctgggctgatgtggtgatctggcagatgccaggctggtggatgggcgcgccgtggacagtgaaaaaatacattgatgatgtattcaccgaaggtcacgggacgctgtatgccagcgatggccgtacccgcaaagatccgtcaaaaaaatacggttccggcggcctggtacagggcaaaaaatatatgctttctctgacctggaacgcaccaatggaagccttcaccgaaaaagatcaattcttccacggcgttggcgtcgacggtgtgtatctgccgttccataaagcaaaccaattccttggcatggaaccgctgccgacatttatcgctaatgacgtgataaaaatgcctgatgttccccgctatactgaagaatatcgcaagcatcttgtggaaatttttggttaactagagctcaggctttagaaggagttaaccatgcttaccgtaatcgcagaaatccgtactcgtcctggtcaacatcaccgtcaggcggtattggatcagtttgctaaaatcgttccaaccgtactgaaagaagaaggttgccacggctatgcgccaatggtggattgcgctgctggcgtgagtttccagtctatggcaccggattctatcgtgatgattgagcagtgggaaagcatcgcgcaccttgaagcgcatctgcaaaccccgcacatgaaggcgtacagcgaagccgtaaaaggcgacgtgctggagatgaatattcgtattctgcagccagggatttaatcctgccttgtttgcccggccatcctgaccgggcaatgttctttcctttaaacctcaatctccgccatgtcgcctttctcttgcaaccagttgcggcgatcttccgagcgtttcttcgccagcagcatatccatcatcgcgtcagtacgctgatcgtcttcatcatcgatagtcaactgcaccagacggcgagtgttcggatcaagcgtggtttcacgcaattgcatcgggttcatttcccccagacctttaaaacgctggacgttcggcttgcctttcttgcgttttaattgctcaagtacgccctctttctcttcttccgtcagcgcgtaataaacctctttcccgagatcaatacggtagagcggtggcagtgcgacgtaaacgtgaccgtgtttcaccaacgcgcggaagtgttttacgaacaaagcgcagagcagcgtggcaatgtgcagaccatcagagtccgcatccgcgaggatacagattttgccataacgaagctggctcagatcgtcgctgtcaggatcgataccgatcgctaccgaaatatcatgcacttcctgcgaggccagcacttcgtcggaagaaacttcccaggtgttaaggatcttacctttcagcggcatgatcgcctgatattcacgatcgcgcgcctgcttggcagatccgcctgcggagtcaccttccacgaggaacagttcggtacggttaaggtcctgcgcggtacaatcagccagtttgccaggcagcgccgggccgctggtcagctttttacgcaccacttttttagccgcacgcatacgacgctgggcgctggaaatcgccatctctgccagcaactccgccgcctgaacgttctggttcagccacaggataaaggcatctttcaccacgccagaaacgaatgccgcgcattgacgcgaagagagacgctctttcgtctgcccggcaaactgcggatcctgcattttcaccgacagaacataggcgcagcgatcccagatatcttccgccgacagcttcacgccgcgcggcagaatgttgcgatattcacagaactcacgcatcgcgtccaacaggccctgacgcaggccattaacatgggtaccgccctgcatcgttgggatcaggttgacgtagctttcggtcagcagttcaccgccttccggcagccacagtagcgcccagtccacagcttcagtatcgccagcgaaattaccgataaacggtttttctggcagcgtcggtaaaccgtttaccgcttccgccaggtaatcattcagaccgtcctgatagcaccagcgctgttcggtgttgttgatctcatctttaaaggtaatctcaacgccggggcacagtaccgctttggctttcagcacatgcgtcaggcgtgaaacagaaaatcgcgggctgtcaaagaaggtttcatccggccagaagtgcacgctggtaccggtattgcgtttaccgcaagtgccgacaacctgtaaatcctgcaccttttcgccattttcaaaggcgatgttataaacctgaccatcgcggcgcacgttaacttcaacgcgcttcgacagggcgttaaccaccgaaatccccacgccatgcaggccgccagagaactggtaatttttgttagagaatttaccgcctgcatgcagacggcaaagaatcaattcaaccgccgggacaccctcttccgggtgaatatccaccggcatcccgcgcccatcgtcaataacttctaacgactggtcagcatgtaagattacatccacgcgttttgcgtgacccgccagtgcttcatcgacactgttatcaataacttcttgccccaaatggttagggcgagtggtatcggtatacatccccggacggcggcgaaccggctcaagcccggtgagtacctcaatggcatcagcgttataagtttgcgtcatggtttaagttagcaattcgagttgatcgtcagagatggtgcagaccaagaaaatcgacgatcgggttgaaataatcttcgaagcccgtgaatgcgtggttgccgccttctatgacagtctggcggcaggaagcgtagtacgccaccgcctggcggtaatccagcacttcatctcccgtctgttgcagcagccagatcaaatccggcgcttccagcgggtcaatctgcatgactttgagatcgtaaatatggcgtgactctagcacatattgctgcccggtgtatgggttctcgttctgaccgagatagtccgtcagcagttcaaacgggcgcaccgccgggtttaccaccactgcgggcagcataaaacattgtgacaaccaggtggcgtaatatccccccagtgacgaaccgacaatacccagcgaatcgccgccatgttccaggacaatggattccagcagttctgccgcgtcggaaggatacggcggcaactgcggaatgatcatctcaacgtcagggtgatgttccgccagccagttttttaacaagctcgcttttgcagagcgcggcgagctgttgaaaccgtgtaaataaagaagcgtagacatcagtagccttctgaagcggtatcaggttggaaacgtgtgtccgccaggcgatgcacctcggtggtcagcgtgccatcagcatgtaactcgagagtacgccagccgggcgcgatagtatccagcgtaaagttggaacagtgcggcttaaactgcacacaggtcgacggcgttgccagcaggcggcgaccgttccagtcgagatccagctcctgatgaatatgaccgcacagcaagtatttgacgtgcggaaacttcgccagcacggtatccagttcgcccgcgttacgcagactgtgttgatcgagccaactacaacccgcaggtagcggatgatgatgcagcagcagcaacgtatggcgttctggcgcatcggccagtttacgttccagccactcaagctgaaactcgctcagctcaccgtgcggcacgccaaacacctggctatccagcaacaggatttgccattgctcaccaataaacacccgcttcgccggggagatacccgcatcctgtaacgcgctgtacatcgcgggctggaaatcgtggttgcccggcagccagacgcagggcgcacgaaaacttgcgatgccttcagcgaaatgctgataggccgcagaggattgatcctgcgctaaatcacctgtcgcgacaatcaggtcgaattcgtgctgatgtggacgaatcgcctccagcaccgcctggtagctttcccaggtgtttacccctaacagagcttcgtgcttttgtgcaaacaggtgagtgtcggtaatttgtaaaatcctgactctggcctcaccagccagaggaagggttaacaggctttccaaatggtgtccttaggtttcacgatgctagtaaaccggaatcgccatcgctccatgtgctaaacagtatcgcaaccagtccgctaaaaactgattaatttgatgcttttcgtcgcgttgatgcaactttttattaggataatcataccgcgctttgaagcgaaaaatctgctggcttgaacacacttcagccaccatcgcgtcatgatacagacgcaccgtcattgacggaaggctccagtaactgatcgcgggcgcagtctgttctattgtcaccagggtagtgtatcgggtcgattccacaatcgtcagccgatattgtgcgtttgccacctgatagcttacagtttcgccgggtgcgtcattgcgcggtaacaaacggcgcaattgtgaaaagttcatctcgcacaggcgcatcatttcaggaaagtcaggtgtgtaacgcttcatttatgcccactcattttttaacgcttgatgatgcagctgcagccattgcaaagcgatgaccgacgctgcgttgtcgattttcccctcttctacccactggtatgcctgttcccggcttaccacatgaacgcgaatatcttcgttttcatcagccagaccatgaataccgcttgcggtcgtggcgtccacttcgcccaccataattgacgaacgctcactggtgccccccgggcttgccaggaaacttaacaccggtttggtccgtttgactatcagtcccgcctcttcaatcgcttcgcgacgggcaacatcttccacactttcaccctcttctatcatcccggcaaccatctccagtagccagggggtttcactggtgtcgtatgcggcaatccgaatctgctcaatcagcacaacttcatcgcgcactgggtcaaagggtagcaagactgcggcgtgaccgcgctcaaaaatttcccgccgtacctcatgactcatttgcccgttgaatagacgatgacgaaatctataaagatctaatgaaaaaaagccgcgataaagtgtttctcgtgcaataatttctacatcgtttttgccaaatgtaacgggcaggttgtctggcttaagcattgttaatgtcctggcactaatagtgaattaaatgtgaatttcagcgacgtttgactgccgtttgagcagtcatgtgttaaattgaggcacattaacgccctatggcacgtaacgccaaccttttgcggtagcggcttctgctagaatccgcaataattttacagtttgatcgcgctaaatactgcttcaccacaaggaatgcaaatgaagaaattgctccccattcttatcggcctgagcctttctgggttcagttcgttgagccaggccgagaacctgatgcaagtttatcagcaagcacgccttagtaacccggaattgcgtaagtctgccgccgatcgtgatgctgcctttgaaaaaattaatgaagcgcgcagtccattactgccacagctaggtttaggtgcagattacacctatagcaacggctaccgcgacgcgaacggcatcaactctaacgcgaccagtgcgtccctgcagttaactcaatccatttttgatatgtcgaaatggcgtgcgttaacgctgcaggaaaaagcagcagggattcaggacgtcacatatcagaccgatcagcaaaccttgatcctcaacaccgcgaccgcttatttcaacgtgttgaatgctattgacgttctttcctatacacaggcacaaaaagaagcgatctaccgtcaattagatcaaaccacccaacgttttaacgtgggcctggtagcgatcaccgacgtgcagaacgcccgcgcgcagtacgataccgtgctggcgaacgaagtgaccgcacgtaataaccttgataacgcggtagagcagctgcgccagatcaccggtaactactatccggaactggcggcgctgaatgtcgaaaactttaaaaccgacaaaccacagccggttaacgcgctgctgaaagaagccgaaaaacgcaacctgtcgctgttacaggcacgcttgagccaggacctggcgcgcgagcaaattcgccaggcgcaggatggtcacttaccgacgctggatttaacggcttctaccgggatttctgacacctcttatagcggttcgaaaacccgtggtgccgctggtacccagtatgacgacagcaatatgggccagaacaaagtgggcctgagcttctcgctgccgatttatcagggcggaatggttaactcgcaggtgaaacaggcccagtacaactttgttggtgccagcgagcaactggaaagcgcgcatcgtagcgtcgtgcaaaccgtacgttcctccttcaacaacattaatgcatctatcagtagcattaacgcctacaaacaagccgtagtttccgctcaaagctcattagacgcgatggaagcgggctactcggtcggtacgcgtaccattgttgatgtgttggatgcaaccaccacgctgtacaacgctaagcaagagctggcaaatgcgcgttataactacctgattaaccagttgaatattaagtcagctctgggtacgttgaacgagcaggatctgctggcactgaacaatgcgctgagcaaaccggtttccactaatccggaaaacgttgcaccgcaaacgccggaacagaatgctattgctgatggttatgcgcctgatagcccggcaccagtcgttcagcaaacatccgcacgcactaccaccagtaacggtcataaccctttccgtaactgacgacgacgacggggcttcggccccgtctgaacgtaaggcaacgtaaagatacgggttatctgccgcattcttcccccttctcgcttcaatttcgaccagccatcctctattctgatgggtatttaccactggtcccggaagacaaaaatgaaacggacaaaatccatacgccacgcatcgttccgcaaaaactggagcgcacgccatctgacaccagtcgctctcgcggttgccactgtttttatgctggctggctgtgaaaagagtgatgaaacagtgtctctctatcaaaatgctgacgactgttcagctgcaaacccaggcaaaagcgccgaatgtaccaccgcgtacaacaatgcgctgaaagaagccgaacgtactgcgccgaaatacgccacccgtgaagactgtgttgctgaatttggtgaaggtcagtgccagcaggcaccagcccaggctggcatggcaccagaaaaccaggcgcaggcccagcaatccagcgggagtttctggatgccgctgatggccggttacatgatggggcgtctgatgggcggcggcgcgggatttgcacagcagccgctgttctcctcgaaaaacccagccagcccggcttacggtaaatataccgacgcgacgggtaaaaactatggcgcagcccagccaggccgcaccatgaccgtaccgaagacagccatggcaccaaaaccggcgaccactactaccgttacccgtggcggttttggtgaatctgttgccaaacaaagcactatgcagcgtagcgcaaccggcacctcttctcgttcaatgggtggctgataccgatggaaagagtcagtattaccgagcgcccggactggcgcgaaaaagcccacgaatacggtttcaattttcacaccatgtacggcgagccgtactggtgtgaagatgcttactacaagttgaccctcgcccaggttgaaaagctggaagaagtcaccgccgaactgcaccagatgtgcctgaaagtggtggaaaaagtgatcgccagcgatgagctgatgaccaaattccgcattccaaaacgcacctggagttttgtgcgtcagtcatggctgactcaccagccatcgctttattcgcgtcttgatctggcatgggatggcactggcgaacctaaactgctggaaaataacgccgatacaccaacgtcactatacgaggcggcgttctttcagtggatctggctggaagatcagcttaacgccggtaacttgccggagggcagcgaccagtttaacagtctgcaagaaaagctaatcgatcgctttgtcgagttgcgtgaacagtatggcttccagttgctgcatctcacctgctgtcgcgacacggtggaagatcgcggaaccattcagtatttgcaggactgcgcgacggaagctgaaatcgctaccgagttcctctacattgacgatatcgggttaggtgaaaaaggtcagttcacggatttacaggatcaggtaatttccaacctgttcaagctgtatccatgggaatttatgttgcgtgagatgttctccaccaagctggaggatgcaggcgtacgctggctggaaccggcgtggaagagcattatctccaacaaagcgcttctaccgctactgtgggagatgttcccgaatcacccgaacctgctgcccgcttattttgcggaagatgatcatccgcaaatggaaaaatatgtggttaaaccgatcttctcccgtgaaggcgcaaacgtgtcgatcattgagaacggcaaaaccattgaagcagcggaaggtccgtatggcgaagaagggatgattgttcagcaattccacccgttaccgaaattcggcgacagctatatgctgattggtagctggctggtgaacgatcaacctgccggaattggcattcgtgaagaccgtgcgttgatcacccaggatatgtctcggttttatccacatatttttattgagtaatcaatgatgccggatggcattcgccatccggtaattgttaacctatctgcaccgacagcatactcaggctgcccatttctataccatcgaccggaatggtaattggctcctgcccatcccacgcacctaagacatacaacaacggcagatagtgctccggcgttgggttcgataacgcgccaccttcatggtcaaggtaattcaccagaggatgctgctctaccgccccttgccacgtcagattcgctttcacatactcattaaacgacatcgcccaaggatatggtgaactatcaccgtgccacttcactgtacgcaggttatgcaccacgttgccactggcgaccaacattattccttcatctcgcagcgctgccagtttgcgccccatttcgaaatgccaggcggcaggtttgctactgtcgatactcaactgcaccatcgggatatcggcgtcaggatacatcttaatcagcacgccccaggaaccgtggtcaaagccccaggcttctttatccagcgtcaccgggaccgacgctaacagctcaaccagatgctgtgccagcacaggcgaacccggagcaggataatgcgtatcgtacagcgcctgcgggaagccaccaaagtcatgaatcgtgggcggcgtctccatcgcggtcactcctgttccacgggtaaaccagtgagccgaaaccaccacaatcgcttgcgggcgtggcaatgtcatccccaacttctgccagctgcgggtatacaaattatcttccagcacgttcatcggactaccgtgacctaaaaacaatgctggcatacgtgttgaagacatgatgatatccttaactaaaggtgtcattttgatatcctcacaatacgcttgttcggcggagtaagaacccggataacaatgatgatgatcatcagttattttgacgatctgcctgaaggtgaagatttataaggagttgtcgatgtcagtacctctcattctgaccatactggcgggggcagccacgtttattggcgcgtttctcggcgttctcgggcaaaaaccctcgaaccgcttactggcgttttcgctaggatttgcggcggggatcatgttgctcatctcattaatggaaatgcttcctgccgcactagcagctgaaggaatgtcgcctgtgttgggttatggaatgtttatcttcggtctgcttggctattttggcctggaccgcatgttgccacatgcgcatccgcaggatttaatgcaaaaatcggtgcagccgttgccaaaatcgatcaagcgcacagccattctgctcactctcggcatcagtctgcataacttcccggaagggattgccacctttgtcacggcgagcagcaacctggagctgggatttggcatcgcactggccgtcgcgttgcacaatatccctgaaggtctggcagtggcaggcccggtttatgcggcaacggggtctaaacgcaccgcgattctgtgggcggggatttctggactagcagaaattcttggtggtgtgctggcgtggttaatcctcggtagcatgatttccccggtggtcatggcggcaatcatggcggcggttgcaggaattatggtggcgctctcggttgatgaattaatgccgctcgccaaagagattgaccctaataataaccccagctatggcgtactatgtggaatgtcagtgatgggattcagtttagtgctgctacaaacggcgggaattggttaaaaacaacatcagaagttgtccagcacatggacaacttctgccagcttcacgaaagccttattctaccttttcggctgtctcttctctcgtactgtttaagtatttgttccgcgcttcaagcagtgcgtctctgtcctggcgaaacgcccgacaataacgtttcaaatgcaggaaataacccaccacaaccagagcaatcaatacaatccagtaccaggcgataaacatccttttacccttaatatttaacaatactaaacatttagcgcataaatttcacatatcctttttcggatatattcatatggtcgcataataacggaacaattatatgattttgatcataatgaaaaagaatgcctgatattaatgaaattttctcatagaaagagaagcggaattaacatcttgcatagcagggcaaaataaaaaccgaagccagctacaacttcggtttcttgattaaggcagtaattaagcagcggttttcagctggctttacgctcatgtgcctgacggtatgccaccaggtcttcaatagtcacgagcgccatattgtgtttattggcaaactcaatgcactctggtgcacgcgccatcgtgccatcgtcattagtcagctcacacagcacaccagccggtttaaagcctgccagcgtcatcaaatcaatagtcgcttcagtatgaccgccacgcgtcagtacaccacctgcctgcgcgcgaagtgggaaaacgtggcccgggcgattcagatcagaaggttttgcgccatcggcaatcgctgcgcgaacggtcgtaatacgatcagcggcagaaacaccggtagtcacaccttcagccgcttcaatggtcacggtaaaaccggtgccataggcgctggtgttattttctaccatcattggcagatcaagttgtttacggcgatcttcagtgatgcacaggcaaacaataccgctaccgtggcgaatggtcagcgccatctgctcaacggtcatggtttctgccgggaagatcatatcgccttcgttttcacggtcttcatcatcaagcaccattacaccgcgtccttcacgcagcgcagccagtgcattttcaacacgttcgaaaggcgtaccaaaagaggaaagtagcgtctgattcatggtaaaaaaacctcactaaaattatggttaccagaatcagggcagtcttaggagtggcggcatatagccaaaataacgtgagcgggtccatgcccgacagaatcgttactctctcccatccggactctaaccgtcggccccggaattacaccggatctgctgtcctttgagttcgcacccaaagcgctcgcgggctttcaactgagttgatttaccgccggtggggaatttcgccccgccctgagaataagcggattcactataacgctaatgattagcggcagcaacgcatagcttcacataattctggtttatgacttacccttatcgcactacaatggtactcaacacctatcagtacagggaaactacaatgattgacccgaaaaaaattgagcaaatcgctcgccaggttcacgaatcaatgcctaaaggaatcagggagttcggggaagatgtggagaaaaaaatccgccaaaccctacaagctcagctgacgcgcctcgaccttgtaagccgtgaagagttcgacgtccaaacgcaagtcctgttacggactcgtgagaaactggcgcggcttgaacaaagaatgagcgaactggaaaatcgcagtactgagattaaaaagcagccagatccagagactctccccccaacgctgtaaacatttgtctttaatgcactgtaaattatgaattaatcttctaatttacagtgctttctattaccttatcgcttaattccattcagaatatcatcacaaaaatgaatgagtgcaattgaaaatataattgttatgtattttttaagttttacttaatccatatttagataaactaatttcataaaacccgaaaagtaaaatataatatttgaatgattagcaatccttaaataacagttactaatcattcattttctacttatatttatataaaggaatattatgtctgcttttaaaaagtcacttcttgttgctggcgtagcaatgattctttccaataacgtatttgctgacgaaggtcacggcattgttaaatttaaaggtgaagttatctctgctccatgttcaattaaaccaggtgacgaagacttaactgtaaatctgggtgaagtagcagataccgttctgaaaagcgaccagaaatctttggctgagcctttcactattcacctgcaagactgcatgttgagccagggtggaaccacttattcaaaagcgaaggttactttcaccacagcgaatactatgacgggtcagactgacctgctgaaaaacaccaaagaaactgaaatcggtggtgccacaggcgttggcgtacgtattctggatagccagagcggcgaagtgactttaggtactccggtagtaattacattcaacaatactaacagctatcaggaactgaacttcaaagctcgtatggaatccccgggcaaagatgctaccccgggcaacgtttacgctcaggctgactataagattgcttacgagtaatcacattaggccgggttcgcccggccacatcattaacggattaatgataagtggaacagatgtataaaaaattaaaattaaccacaataagcgaattgattaaaaatatttattgttcattatccgttctcatcattggttgtgcgtcagcttatgccgttgaattcaacaaagatttaatcgaagccgaagatcgtgaaaacgttaacctttcccaatttgaaactgatggccaattacccgtaggtaaatactcattaaacgctcttattaataataaaaggacgccaatccatctggacctgcaatgggtattaattgataaccaaactgcagtttgtctgactccagagcaattaacattattaggctttactgatgagattattgaagaggctcagcaaaacctgatcgatggttgttaccctatcgaaaaagaaaaacaaattacaacttatctcgataaagggaaaatgcaattatccatatctgcacctcaggcatggttaaaatacaaagatgcaaactggacgcctcctgaactttgggatcatggtattgctggggcatttcttgactacaatttatatgcctctcattatgcaccacatcagggcgataattcacaaaatataagttcctatgggcaggctggggttaatcttggggcctggcgcctgcgtactgattaccagtacgatcagtcatttaacaatggcaaaagccaggcgaacaacctggattttccgcgtatttatttgtttcgcccaatcccagcaattaatgcaaaactaactataggtcaatacgatactgaatcctctattttcgactctttccatttttctggcgtttcgttgaaaagcgatgagaatatgttgccgcctgatctacgtggttacgcaccgcaaatcacgggtgttgcacaaacgaatgcaaaggtcactgtctcacagaacaaccgtattatttatcaagaaaatgttcctcctggcccatttgctattactaatttattcaatacattacaggggcaactggacgtcaaggttgaagaagaggacgggcaagtcacgcaatggcaagttgcatctaatagtattccttatctgacgcgtaaagggcagattcgctacaccactgctatgggtaaaccgaccagcgttggtggtgattccttacaacaacccttcttctggactggtgaattctcatggggttggctgaacaatgtatccctgtatggtggttcagttttaacaaaccgtgattatcaatctctggctgccggcgttggctttaaccttaactcattgggttcattatcttttgatgtcacacgatctgatgctcagttgcataatcaggataaagaaacgggttatagctaccgcgctaactattcaaaacgttttgaatctaccggtagccagctcactttcgctggttaccgtttctctgataaaaactttgtgacaatgaatgaatatatcaatgacactaaccattacatgaattatcagaatgaaaaagagagttatattgtcacgtttaaccagtatcttgaatcattaaggttaaatacatacgtaagtttggctcgtaatacttactgggacgccagcagtaatgtgaattattcattatcacttagccgcgattttgatatcgggccattaaaaaacgtctccgcttctctaacatttagccgaataaactgggaagaagacaaccaggatcaactgtacctaaatatttcgattccctggggaaccagtagaacattgagctatggtatgcaacgaaatcaggataacaagatttcgcatactgcttcgtggtatgactcttccgatcgaaataattcctggagcgtttctgcttcaggcgacaatgatgaattcaaagatatgaaagcgtcactacgcgccagttatcagcataataccgagaacggtcgtctctatctctccgggacatcacagcgagacagttattattctctgaatgccagttggaatggttcattcacggcgactcgtcacggagccgctttccatgactatagtggtagtgctgactcgcgttttatgatcgacgcagatggtgcagaagatattccgttgaacaataaacgcgcggtaactaatcggtatggcatcggagttattccatcagtcagcagttacataacaacatcattaagcgttgatacccgaaatcttccagaaaatgtggatatcgaaaactcggttatcaccaccaccttaaccgaaggtgctattggctacgccaaacttgatacccgcaagggctatcaaatcatgggggttattcgcctggcagatggtagtcacccaccactggggattagcgtaaaagataaaaccagccataaagaattaggactggttgctgatggcggctttgtatacctcaacggcattcaggatgacagcaaacttactttacgctggggtgataaatcctgttttattcaaccacccaatagcagcaacttaaccaccggaacggttattttaccgtgtattagccaaaattaattcaggatgaaactaatgcgctacttaaacacaaagaatctcattgcagcaggagtattactcgcctgcatgagcagcattgcctggggtgccatcatcccggaccgtacccgtatcataatgaatgagtcagataaaggggaagcattaaaacttactaatcaaagcaaaaatctaccctatctggcgcaaacatggatagaagatacgaaaggcaataaatcacgtgactttattgtcacggttccccctatggtacgtttaaatcccagtgagcaaattcaaataagaatgataagtcaggaaaaaattgctcaactgcctaatgacagagaaacgctcttctattttaacgtgcgagaaataccgccaaaaacagataaaaaaaatgtgatgcaagtcactatgcagcacgcattgaaactattctggcgaccaaaagctattgaattagaagatgatggggtaatgtcttacgaaaaagttgaaatcatccgtagaaatgatggttcgatccgctttaacaataagatgccttatcacgttacgctgggttatatcggaacaaacggaatcacaatgttgccacaaacgcaaagtttaatggtaaccccttatagccatgcagatacgcagtttaaaaatgttccgtcagcttttcaggttggttatatcaatgattttggtggattaagtttttatgaaataaactgcccgacggttaataactcttgtaatgtttccgtagccaaacgagataaataatatgcgctacttattaattgtaattatatttattataggttttagtgcattacctgtatgggcaatggactgctatgctgaacatgaagggggaaataccgtagtcattggttacgtaccaagaatttctatccccagtaatggtaaaaaaggtgataagatctggcaaagcagtgagtattttatgaatgtcttctgtaataatgcattacctgccccatcacctggagaagaatacccatcagcctggactaatataatgatgtttttaccaggcggtcaggacttttataatcagaactcctatatttttggcgtaacatacaatggagttgattatgattcgactgcccctaatgctatcgcagcaccagaatgcattgatataaaaggagcgggtacctttaataatcactataaaaaccccgctgtctgtagtggaggtcctgagcctcaattatcagtaacctttccagctcgcgtacaactctatattaaattagcaaaaaatgccaatagagttaataaaaacctggtgttacctgatgaatatatcgctctagagtttaaaggtatgagtggcgcaggagctatagaagtagacaaaaatttgaccttcaggattcgtggattaaataatattcatgtccttgactgctttgttaatgtcgcactggaaccagctgatggcgttgttgactttggtaaaataaattcccgaacaattaaaaataccagcgttagtgagacgtttagtgtagtcatgacaaaagatcctggtgcggcctgtactgagcaattcaatattttagggagctttttcactacggatattttgagtgattatagccatctggatatgggtaatggactgctattgaagatatttcataaagatggaacagcaacggaatttaaccgcttctcacaatttgcttctttttcatcgtctagtgcaccttcggtcaccgcaccattcagggcagaacttagtgcgaacccggcagagactgttgttgagggaccgtttagtaaagacgtaatcctcaaaatcacctataactaaatagctgcgcttaataccgctacacttttgccagcccatgtttgcctccggggaatgggctgacggtttccataaaatggcgaacttttttcaacagttgccacattgagctgcactgatgattacgcgttattgtgtcgtgaagtgcctgccatagccgttcaacatgattcacccatggcgagtaaaccggctgataaatgaccctgaacttcgggttctccttcagccagctctgtgtttcccggcttttgtggataatgtagttgtccacgatcagcgtgatggttttcgcccgacggtatgtcgctttaagccgcttcagcaggctgatgaacagcgccgaacttttgctgttgccgcccacacagctgactttacctgtcccgctgtgcagcgctccggccagataatatttttcattctgtcccggcgtgaccacccgtttttgctgtccgcgcagttgccagtccgcaccgattttgggattaagatggatatccacttcatcttcataaaagaccggatgctctgcgctgcattcgtccagtgctttatggattgctgccatcttttcatctttatgcgggtcacggatacgcagagttggcgcagcccttcgccacacaatccccgcagacggcaaccagcggcgaacggttccggcatttaactggcaaccggttatctcattgatttttattgccagcagttctgtactccagcgtgaacgctggtagccaaagtcgccgggagaatgttttaccagctcacgtaacagtgtgcagatatgctcaaacggccagcgacgggcacgcccggcaggtaatgatttcagtccctcaacacccgactgcgtgaaccagttaatccagcgtccaacagaggaacaggcgcagcagagcgttctggcaacgtcgctgacacggtcgccccggtgcagcatcagcatggcagtcagtctgcgggcataatttttatcgtgtgttttatggatggctttctgcatcaggcgtcgttcgtcacgggaaattggtgctatgatcggcattgctcagtccggttggtgatttgttttgatttggcgattgatcagatcgcacaatccgggctaagttccctcaaagtgatctactattccgcgcagctatttagcatctaatacaaacactaaaacgggccatcaggcccgttatatcagtgctctaactccagctctcttgcctgcatcatctgttggcaataccaggcataacgtgcgcaaaaccaggttctatgttcttcatccatgttaccagtaacggcaagaatatcgaccgggcgaccttctgcgtgcattctggcaaaactacgcgccaggaaatcgaaattatttaaagaattaagactatgatccataagcacatcctccggttatcgcataccttttaaggccatatgctttttctgatttcagtattccccaatcagtgtagtgcctttaaacataacgtgcgtaaatatattgtccccgatcacactttttagtgaaaaataaaaaactatattaaaaaactttctcttccagaacttctctaacatgtgttattattaacaaagataaatgtaagcaaggaaactatcccaaagtaaatattgcgtcactaaatggacattggagtgacatatgattttattcgccgactataataccccttatcttttcgctatttcctttgtactgttgatcggccttttagaaattttagcgcttatctgcggtcacatgctctccggtgctcttgatgcacatcttgaccattataattccataaccacaggtcatattagccaggcacttcattatctcaatatcggaagattgccagctctcgtcgttctctgcttgctggctggtttttttggtcttattggcatcctgttgcagcatgcctgcatcatggtctggcaatcaccactgtcgaacctgttcgtggttcctgtcagtttactgtttacgattattgcggtgcattataccggtaaaatagttgcgccctggattccacgcgaccatagttcagctattacagaagaagaatatattggtagcatggcattaattaccggtcatcaagccacttcaggtaatccctgcgaaggaaaactcaccgatcaatttggccaaatacattatttactactggagcctgaagaaggaaaaattttcactaaaggagtcaaagtgttaattatttgccgactttctgcaacgcgatatttggcggaaaacaatccctggccacaaatattgtaatttattaatcaaaaggaaatttaataatggatgatattgttaattctgtgccctcctggatgtttaccgcgattattgccgtatgcattctgtttattattggaattattttcgccaggctctatcgtcgcgcttcggcagagcaagcttttgttcgtactggtttaggtgggcaaaaagtggtgatgagcggtggcgcaatcgtgatgccgatctttcatgaaataatccccatcaatatgaatactctgaagctggaagtcagccgctcaaccattgatagcctgattacgaaagatcgtatgcgtgtcgatgtagtagtcgctttctttgtacgggtaaaaccgtctgtagaaggcatcgccactgcggcgcagacgttggggcaacgcacgctatcaccagaagacttacgtatgttggttgaagataaatttgtcgatgccctccgtgcaacagctgcacaaatgaccatgcatgagttacaggatacccgcgagaacttcgtgcagggagtacaaaatactgtcgcagaagacctatcgaaaaacggtcttgagctggaaagcgtttcacttaccaactttaaccagacctcgaaagaacatttcaatccgaacaatgcctttgacgccgaaggtttaaccaaactgactcaggagacggagcgccgtcgtcgcgaacgtaacgaagttgaacaggatgtagaagttgcggtgcgtgagaaaaaccgtgatgcactttcgcgcaagttggagattgaacaacaagaagcgtttatgacgcttgagcaggagcagcaggttaaaacccgtactgccgaacagaatgcacgtattgcggcttttgaagctgaacgtcgtcgtgaagcagagcagacgcgaattctggctgaacgacaaattcaggaaacggagatcgagcgcgagcaggccgtccgctcaagaaaggttgaggctgaacgtgaagttcgtattaaagagatcgaacagcagcaggtcaccgaaatcgccaaccagacgaaatcgatcgctattgccgccaaatcggaacaacagtcccaggcagaagcgcgtgctaaccttgcactcgcagaagcagtaagtgcgcaacaaaacgtagaaaccactcgccagaccgcagaagccgatcgtgctaaacaagttgccctaatcgctgccgcgcaggatgcagaaaccaaagcggttgaactgaccgtgcgggcgaaagcagaaaaagaagccgcagagatgcaggcggcggctatcgttgagttagccgaagctacacgtaaaaagggtctggcggaagcagaagcacaacgtgcgctgaacgatgctatcaacgtactttctgatgaacaaaccagccttaaattcaaactggccttgttgcaggcgctacctgcggtaatagagaaatccgttgagccgatgaagtccattgacggtatcaagattattcaggtcgatggtctgaatcgtggcagcgctgcgggtgatgcaaacacgggtaatgtggggggcggaaacctagcggaacaagcattatcagccgctctctcttaccgcacacaggcaccgctgattgactccttgctcaatgaaattggcgtttcaggcggctcactggcggcattgacttcacccttaacctcaacaactcccgtcgccgaaaacgtagaataaattttcagctatgaacgtccctggcacaaaaagccggggattttttatatctgcgttccgctaaaaactgcaaatgatcaggccgttgcaacgttttgcgtgaccgctcggggaaggcaaaactgcctctgggaaagcgttgcgcgaggtccggcgctcatcaacaatcggggagtcagcaaagggctgaaacgggaaagcccctcccgaggaaggggccttacagaaggaaagggttatgatgaagctcgtcatcatactgattgtgttgttactcgtaagtttcgcagcttattaacagccaatcagaggggggagaaatcctccctcacccttgttcctttactttaggttgaaaaaaaatcagcgtcaagaaggtttcattaacacatatccctggcccaaaaagccggggattttttatatctgcgttccgctaaaaggtgcaaatgctcaggacgttgcagcgttttgcgtgatcgctcggggaaggcaaaactgcttcagggaaagcgttgcgcggggtccggcgctcatcaacaatcggggagtcagcaaggggctgaaacgggaaagcccctcccgaggaaggggccttatagaaggaaagggttatgatgaagttcgtcatcatactggttgtgttgttactgttaagtttcccgacttactaacaactgatcagagggggaagaaatcctcccttacccttgttcctttactttaggttgaaaaaacaacagcgtcaataggcctgcctgctacaaagcgagatctgtgaaccgctttccggttagccttttttatcctgttggatcttcttgatgatgttagtggtcgagcaaccgtcttcgaagttgagcaccagcacttcgccgccgttggcccagacttctttactcccggcgatctcttctggtttatagtcgccgcccttcaccagtaaatctggcaggatcccggcgatcaagcgctgcggcgtgtcttcttcaaacgacaccacccagtcgaccgcttccagtgcgcccagcacaatcatacgctgttcgagcgggttaacggggcgggaatcccctttcagccgtttggtggaggcatcgctgttcacagcgacaatcagacggtcacccagtttgcgagcatttgccagataggagacgtgcccggcgtgcaggatgtcaaagacaccgttggtcattaccaccttttcgccgcgtttacgcgctgccgctacggccagcttcagttcctcttcggtcatcacgccaaagccggtatctgcgcgcccacgcactgcattttccagctcgatcggcgaaaccgtggaggttcccagtttgccgaccaccacgccagccgccgcattggcaaagaagcaggcttcttccagcgaattacccgctgccagcgttgccgccaggacgccaatcaccgtgtcgcccgcaccggtaacgtcatacacttcctgcgcctgggttggcatatgcagcggcgctttacccggttgcagcagcgacataccctgttcggaacgggtcactaacagagccgagagttcgtaatcggcaatcagtttcatgccgcgctcaacaatctcttcttcggtcttacatttaccgacaacagcttcaaattccgagagattcggcgttaacagcgtagcgccgcggtagcgctcaaaatcggtaccttttggatcaatcagcaccggaacgcccgctttacgcgccagttggatcatctgctgtacgcttgccagcgcacctttggcgtagtcagaaagcaccagcgcgccaatcgaactcagcgcctgattaatccgctcgtgcagcggctgcggatcaacgccttcgaaaccttcttcgaaatccagacggatcagctgttggttgcgggaaagtacccgtaatttggtgatggtcggatgcgtcggtacagaaacgaagtcgcatttgacgttgacgtcggccagagatttactcagcgcgcgcgctgcatcgtcaatgcccgtcaacccgaccaggcgtgcattagcaccgagagaagcgatattcatcgccacgttagccgcgccgcccggacgttcttcgatggtattcactttaaccacgggcaccggcgcttccggcgagatacggctggagggaccgtaccagtaacgatccagcattacatcaccaaccaccatcactcctgcacgttcaaactctggcagcgttactttcattcctgtctcctgagagattcaaaatttgcgcgcgataataccatacttcattcttccaccagccacttctgccagcttgcccgcaccagatcacgctctgcggtgaagcaatcccccgacacatggcccggcaattcctgtaatgccagatgatgaagttcatcgcgcagcgtcgtgtaagcacgggtcagcgccatcgcttcctgctcttccataatgtcgttttgcgccagcagctccagaatacgcacgttgtctgaccagcgcgttaacttcggtttttcatgagcgtagcgcaacaccagatattgggtaataaattcgatatcggtaattccgccttcatcagctttgatatcaaagcgatcgcgatgtttattgccgagatgagcgcgcattttctcgcgcatttcccgcacttccgtttgcagagttctaccttcacgcggcagcgtcataatctcgcgacgcactgcgtcaaagtgcgcggtgagctgcggatcgccgtacactacccgcgcacgcaccagcgcctgatgttcccacgtccaggcctcgtttttctgataatcggcaaatgcttctgtggaggtaaccagcattcccgccgccccggacgggcgcagccgcgcatccacttcgtacaaaatgccggaagaggttcgcgtgctgaacaggtgcataatgcgttgcgccagacgaagataaaactgtcgtccgtcgatttcccgctcgccgtcagtcatcgcatccattgggcaatcatggaggaagatcaggtcaagatcggaactgtagcctaactcccagccgcccagcttgccgtagccgaccactgcaaaaccacgcccttcgcgatcgttgaggtgattcggcttaccgtagcgggcaaccatttgaacccacgcctgctgaacgacggcatctatcatggcttccgccagccaggttaagtgatcgctcactttcatcaccggtagcgtaccagcgatatccgctgcggcgatgcgtaacagctgcgcctgtttgaactgacgcagcgcctcaagctgttgctcttcgtcatcttccggcacgcgcagcaaatactggcgcaactcatcgcggtaggcatcggtcgccgtcggctggtaaagagtgtttggatcgagcaattcatccagcaataatggataacgcgccagctggctggcaatcatcggcgatgcggcacacagagaaatcaaatggttaagcgccgcagggaattcactgagcaattctaaataggtggtgcgggtaacaatccccaccagcaaggcggtaatgcgcgacagcgtgacagcagcgtcttcacgcgcacagacatcacttagcagatgcggcatcagatggtcgagcacctgacgtcctcgcggcccgatggtgcgcttatccagctctttgcggaaatcggaaatcagcgttagcacctgtttgcgatcatcctcgctaagatgcgccagcactggcgtagtgtcatcttcctgcaacgcatcctgccacagctcacgccactgttccgacagcgactcttcctgagtttcactttcgtcgtcgccaatcaattcattaaacacccggcgcacattgttcatatgtgcggtcagcgccccggtcagttgcggccagtcagcaaagtccatcgcccacgccagccgcgcacggttaagctcatcagaaggaagcgtctgggtttgttcgtcgttaatgctttgcagcaggttttccagacgccgcaggaacagatacgccactcgcaattgttcagcatcgttttcagaaagcagatgcagcgcagcaatggcgctgagcgttggcagtaaagagcacgattgcagcgacggttcgcgcccgccgcgaatgagctggaatacctggacgataaattcaatttcgcgaataccacccgcgccaagtttgatgttgtcggtcaaaccgcgccgacgcacttcacgggcaatcattcctttcatgttgcgcagcgactgaatcacgctgaaatcgatgtaacgacggaaaacaaacgggcgtagcatcgcacgcaactcgttagcatagacgccttcgctatcgcccataatccgcgctttgaccatcgcgtaacgctcccagtcgcgcccctgctcctggtaataatcctccaacgcggcaaagctcagcaccagcgggccactttcgccaaacggacgcagtcgcatatccacgcgatagacgaagccatcctgcgttggttgatccagcactttaatcagccgctgccccatgcgggtaaaaaactgcgcgttatccagttcccggcgtccgccctgcgtacaaccatgttccggccaggcaaaaatcagatcgatatcagaggagaaattcagttccccgccgcccagcttacccatgcctaagatcagcagcggttgcgcttcgccctgcgcattgcacggcgttccccactcgcggcagcaggcgtcatacagccagtcacgcgccgcaacaatcagcgtctccgccagataactgagctgctgcaatatgctctcttcagtaaccagtgccagcgtttgcgcccatgcgatgcgcaccataatgcgccgccggaatagccgcagctcgcgcattaacccggcttcgtcactcacattactgagcgcctcctgcaaccatgcagcgtaatgctgccattcatcggcctgcggcggttggctttccagttccgtcaaccactctcgatgcgcaattatgctgtcctgcacaaaatcactgaaagtaagtactgacttcgcctgtgcacttagtggttcctcggctaaaggctctggcagccgctcaacaacggtctgccagtactgctgtaacggtgaagagagcggcttcataagcgattttatccttgcctgattaacgttttccgctgtgcaaccagaacggttcctgattgtttgcctcattacggaaatgctcaatttcaatgcgttgcccggtcgcaatagcgtgacgcagcccctgccagttctccagccaggcatgcgcgacgacaggatcatagtaacccgccagcaacagtattgagtcaatgtcacgcgtcaggcgtggcaactggtcacggtagagatcgcctaacggctggcagaaaacgcttttcagttcagcggcatggtgggaaagatggatatcggcaaagcgtttgaaggagtcgctgattttgccctgcgctttggcatctaaaaatggctgccatgctttgcttaccaaccattcggtcaacgccagcttcgccattgccgtttcggtagagtagaccgccgtcacggcagaaaccgcagaagcaatggtcgcttcgcattgggtcagcaaatcacgtaagtgagtgctcgctttacgcggcacaataccaccgaacagcatcagcgtatgacggaccaggctaatggctgccagcacctgttctttcgccgcatcgttaccgcgtacccacagttcttcatgatactgccattgcgctaacgccagctcgagcgccgcttccagcccctgttctacatcggcttttgccgcaacatgcaaaatggtggtcggtttgatttcacgcgccggattgccctgcgccagatgatagccacgcgccgctttgctcaggctgccctggcgtaatccggtttgcgataccagttggttcgccagtttcagcaccgcgcgcgtgtcgccgctaagcagttccagttccagctcacagataggttcagcaaattcccccgctttcacctccccctgatcgagagcgatttcaattcggctgccatcgaccgccaccagccatttttcgcgataaaaatcggtgctgaacagcggttgtacgcgggaagcgagatcggcaggcaattcaccgttcggccagacttccgagggaaactgcgccaggtcgagcgtcggttcgctcaacgccacgttatattccgggcgctggtgtaagccgcctgtcactcttcctgcaactttcatggtcatctcatagcgaccgttttcgccacgaatacgtaagcccatatcgtgcctacgcagccagttatccggcgtttcgtagtaaatattcagcaactgcacggggtcatggtgctcgccgcccagcgtattgagatggtcacgcaacgcctcaacggcactgtgattaacaataaactttaattcgatttcctgagccatggcctttacttatcggttatgtcacataagtgacgatgaacggcgaacttaatgcgatcttttttgtcagtagatagtattttgcgccaaattgccatgcaacgggcaatttgacgggcgtaaaagtttgaagcagtggcaagacctgacacagaggattccgattgatgtcgaatgctttgcgtagcgacactgatgccactactatcgttccactttccatgacaataacgacagcctgatgccaaaattacgcctgatcggattaactttactcgcacttagcgcgactgccgtctcacacgctgaagaaacgcgctatgtttctgacgaactgaatacctgggtccgtagcggtccgggagatcattatcgcctcgtgggcacggttaacgccggcgaggaagtgaccttattacaaactgacgccaacaccaattatgcccaggtgaaagacagctctggccgtaccgcctggatcccgttgaaacaacttagcactgagccaagcctgcgctcccgtgtgccagatctggaaaatcaggtcaaaaccctgaccgataaactcaccaatatcgataacacctggaatcagcgcaccgcagaaatgcagcaaaaagtggcgcagagcgacagcgtgatcaacgggttaaaagaagaaaatcagaaactgaaaaacgagctgattgtcgcgcagaaaaaggtcgatgccgccagcgtacagctggatgacaaacagcgcaccatcatcatgcaatggtttatgtatggcggtggcgtgctggggcttggcttgctgctcggtctggtactgccgcacctgatcccaagccgcaaacgcaaagatcgctggatgaactaaatcgccttcttcgttgcactgtcttattattaggaattgtgtatttgacgaagggatgatggcgtgaagatttatctggtcggtggtgctattcgggatgcattgttagggctaccggtcaaagacagagattgggtggtagtcggcagtacgccacaggagatgctcgacgcgggctaccagcaggtaggccgcgattttcctgtgtttctacatccgcaaacgcatgaagagtatgcgctggcacgtaccgaacggaaatccggttccggttacaccgattttacttgctatgccgcaccggatgtcacgctggaagatgatcttaagcgtcgcgatctgaccattaatgcgctggcccaggacgataacggcgagattatcgacccgtacaacggtctgggcgatctgcaaaatcgtctgttgcgccatgtttcccccgcttttggcgaagatccgttacgcgtactgcgcgtggcgcgttttgctgcgcgttatgcccacctcggttttcgtattgccgatgaaactctgacgctgatgcgcgagatgacccatgcgggtgaactggaacacctgacgcctgaacgggtatggaaagagacggaaagcgccctcaccacccgcaatccacaggtgttcttccaggtactgcgcgattgcggcgcactgcgcgttttattcccggaaattgacgcactgtttggcgttccggcccctgccaggtggcatccggaaatcgacacgggtattcataccttaatgacgctctcaatggcggcgatgctgagtccgcaggtcgatgtccgtttcgcaactttatgccacgatctcggtaaaggactgacgccgccagaactttggccgcgtcatcatggtcacggtccggcgggtgtgaaattagtggaacaactctgccagcgtctgcgcgtgccaaatgaaattcgcgatttagccagactggtggctgagtttcacgatctcatccacaccttcccaatgctgaacccaaaaactatcgtcaaattgtttgattccatcgacgcctggcgtaaaccgcagcgtgtcgagcaactggcgctgaccagcgaggctgacgtacgcggcagaaccggttttgaatcagcggactacccgcaaggccgttggttgcgcgaagcctgggaagtggcgcagtcagtgccgacaaaagcggtcgttgaagcgggatttaaaggtgtggagattcgcgaggagctgacccgacggcggattgcggcggtagccagttggaaggaacaacgttgcccaaagcctgactgagtataaaactaaacgttaacacgaaccatcccctcgccccttcggggagagggttagggtgaggggaacagaccagcaccggtgcgaacaatcacccccaccccggccctctccctacagagcgagggagaaaaccaggcctgctcccgaaccttttctcaatcaaaagaacacgacgtacaccgcagccgccacaataaagcgataaatggcgaacgggataaacgaaatgcgcttaatcaattgcaggaaggttttaatcgctatcagcgccaccacaaaagcggtgataaacccaacggcaaacatcgagatatcgccggttgtcaggaagccccagcttttgtagagatcgagcgccgttgcgcccatcatcatcggtaccgccagcaggaacgagaactcggaagcagcgtaacggctcacgcccatcagcatcccacctgaaatggtggccccggaacgggagaaacccggccacagcgccagacactggaaacagccaatcataaacgcctgacgataggtcatatcatcaagacccggcgcacgcggctctttcggcttcaggcattcggcggcaatcagcaacaaaccgccaacgaccagtgcatacatcacatttatcgggttaaacaatgacttaatcgtgtcgtggaacaacagccccagtaccaccgccggaatcatccccagcaaaatgtggatcagcgttaaacgacctttgctttctccttcgtgctgcaacgggcggccaaagtggatgccaatcaggccaaacagacgccgccagaacatcactactaccgccagaattgatcctaactggatcacaacttcaaaggttttcgccgtgtcgccctcgaaccccaacaagtgaccgacaataatcatatggcccgtgctggataccggcagaaattctgtcaatccttcgaccacacccaatattgccgctatcagcagcgagtgcatatcgctcatcaataaacccctaaattattaaaatgtaccgcttgtccggactactgcagtaagaccaggttataaccgtttggtttaacagctgtaaaattaattattttctttcagattattgccacgctcaatgattacaccaacattcgccgcccgcgccattgcgcctggcttgctgagtttgatgcgcacccacggcgagttgaagcgtgctaacagcagctccgccacctcttcagccacgcgttccaccagcgcaaaacgcgccccctcgacgtggctgaccaccgtttctgcaatgtcagcgtaactgaggcaatccgccacatcatcacttttcgccgctttacggttatcccatgccatttcgatatcgaacactaacttctgttcgatggtctgttcccagtcgtaaacaccaatagtggtgattaccgaaagttgctctataaatacaatatccatcacgtcctgcctgctttttggctaaccggataccacttccggcgaaatgtgcgtattatccacagattcatcgttgaacacgaattttcaaaacggaacagcttatgagtgcaatcgcgcctggaatgatcctcatcgcgtacctctgcggctccatttccagtgccattctggtttgccgcttgtgtgggctgcccgatccgcgaaccagcggctccggcaatccaggcgcaaccaatgtgttacgtatcggtggcaagggagcagccgtagcagtactgattttcgacgttctgaaaggaatgttgcccgtctggggcgcgtatgaattaggtgtcagccccttctggttaggcttaattgccatcgccgcctgtcttggacacatctggcccgttttcttcggatttaaaggaggaaaaggcgttgctaccgcttttggtgccatcgcacccattggctgggatctcaccggagtaatggcgggaacctggttactgaccgtgctattgagcggatactcgtcgctgggagcgattgtcagtgcactgattgctccgttttatgtctggtggtttaagccacaattcaccttcccggtttcgatgctctcttgcctgatcctgctgcgtcatcatgacaacatccagcgtctgtggcgtcgtcaggagacaaaaatctggacgaaattcaaaagaaagcgcgaaaaggatcccgagtgatttctggtggatctacatgacctgatagccttcatcgggcttgcccagccgttgctggcaccatgccgccagaaattccacgcagacacgtaatttcatgctgcgatagagcggctcccggtaaacagcccagatattggcgctttgtgcatactccggcaatacttgcaccagtttgccactctccagaaacggcaacacatcccactcggaacgcagcataatccctttgccctccagcgcccattgcaacactatctcgccgctattggaggaaagatgcccgctaaccttcaccgattttttctcctgaccgttccccaactcccatattccgtgggtcatatcgcgctctttggtcaccagacagtcatgacgacttaattcctgtaatgattgtggctgcggatatttttgcagatactcaggtgctgcgcataatattcttttatttttcgttaacagatgcgcaatataataatcaggaatttcgtcattaatacgaatatccagatcaatattatcctgcactaaatcaatttgccgatcgaacaattcaaaatgcacctgtaactcaggataattgcgcataagttcggtaatggctggcgcaatatggctgcgcccaaaaccaaaactgcaaccaatacgaatcatcccctccgggcgcgttttgatttgcgtgacgtcatcgaccagtcgctgatattgggtgaggatttccagcgcatgttcgtaacaacgttggccactttcagtcagcgccacgccgcgagcggagcggttcagcagcgttgttgccagcgtattttcaaggatttggatccgcttggtgacaaatgcaggcgtctgcccaagcgtcgccgctgcggcgctaaaactcccgctgtggacgatttctaccagtacctgcaagtctttggctaaaggccagctattcagcatcgttaattatccgcagttgtgataagcgcagtgtatttcgcaaaacattgccattccctgctctggcgcaatattcattcttattttcgcgttgattcacgaattgttaattacatattcacggtggcaaaaaatataaaaccacatttttagtggtagtttgtggcggtgaatttttccagacaaatacaaaaactggagttgccatgatgagcgaaagtaataagcaacaggcagtgaataagttgacggagattgtcgctaactttaccgccatgatttctacccgaatgcctgatgacgtggtggataaactaaaacagctaaaggatgccgaaacgtcgtcgatggggaaaattatctaccatacgatgttcgacaacatgcaaaaagcgattgacctgaatcgtcctgcctgtcaggacaccggggagattatgttcttcgttaaagtcggttcccgcttcccactgcttggcgagctgcaaagcatactcaaacaagccgtggaagaggcaaccgtcaaagcgccactacgtcacaatgcggtagaaatttttgacgaagtaaacaccggcaaaaataccggtagcggcgtaccgtgggtcacctgggacatcatccccgacaatgacgatgcggaaatcgaagtttacatggcaggcggcggctgcacgctacctggccgctcgaaagtgttaatgccgtcagaaggctacgaaggcgtggtgaaattcgtcttcgaaaatatctccaccctcgccgtaaacgcctgtccaccggtactggtgggcgtgggcatcgccacctcggtggaaaccgccgccgtactctcgcgtaaagccattttgcgcccgattggcagccgccatcccaatccaaaagcggcagaactggagctacgcctggaagaaggactcaaccgtctggggattggtccacaagggctgactggcaacagttcagtgatgggcgtacatatcgaatctgccgcccgccatccgtcaaccatcggcgttgctgtctctaccggctgctgggcgcatcgtcgcggcacactgctggttcatgccgatctcacctttgaaaatctgtctcacacccggagcgcgttatgaaaaagatcctgacaaccccgatcaaagctgaagatctgcaagatattcgcgtcgacgatgtgatctacctgaccggtacgctggtgacctgccgtgacgtttgtcaccgccgcttgatcgaactgaaacgtccgatcccttacgatctcaacggcaaagcgattttccacgctggccccatcgtgcgcaaaaacggcgataaatgggagatggtttccgttggcccgacaaccagtatgcgtatggaaagttttgaacgtgaatttatcgagcagaccggcgtgaaactggtggttggcaaaggcggaatggggccgctgaccgaagaaggctgccagaaattcaaggcgctacatgtgattttcccggcaggctgcgcggtgctggcggcaacccaggtggaagagattgaagaagtgcactggacagagctcggaatgccggagtcgctgtgggtctgtcgggtcaaagagttcggcccgctgattgtctctattgatacccacggcaacaacctgatagccgaaaacaaaaagctgttcgccgaacgccgcgatcccatcgtggaagagatctgcgagcacgtccattacatcaaataaccctcccggagaggctcgccccctctcctttttcgcaggcataacacgatgaaaccttccactgaatggtggcgataccttgcgccgctggcggtcatcgccattattgctctaattccggttcccgcagggctggagagtcatacctggctctactttgccgtttttactggcgtgatcgttggactgatcctcgaacccgtgccgggtgccgtggtggcgatggtgggtatatccatcatcgccatactctctccctggctgctgttcagcccggagcagctcgctcagccaggctttaaattcactgcaaaatccctctcgtgggccgtttccggtttttctaattcggttatctggctgattttcgccgcctttatgtttggcacaggctatgaaaaaaccgggcttggacgccgcattgcgctgattctggtgaaaaagatgggacatcgcacgctgtttctcggctatgcggtgatgttctccgagctgatcctcgcacctgtaacaccgtccaactcggcgcgtggtgcggggattatctatcccatcatccgtaacctgccaccgctctatcaatcacaaccaaacgacagcagttcgcgcagcattggctcgtacatcatgtggatggggattgttgccgactgcgtgaccagcgccattttcttgacggcgatggcaccaaacttgctgttaattggactgatgaaaagcgcatctcacgccacgctgagttggggcgactggttcctcgggatgttgccgctcagtattttgctggtgctgctggttccctggctggcttatgtgctgtacccgccggtactgaagtctggcgatcaggtgccgcgctgggcagagacggaactgcaggcaatgggcccgctctgttcgcgtgaaaaacggatgctggggctgatagtaggcgcgctggtgctgtggattttcggcggtgattatatcgatgccgcgatggtcggttacagcgtggtggcactgatgctgcttctgcgcattatcagttgggacgacattgtcagtaataaagcggcgtggaacgttttcttctggctggcctcgcttatcaccctcgctaccggactcaacaacaccggttttattagctggtttggcaaactgttagcaggcagcttaagcggttattcgccaacgatggtgatggtggcgttgattgtggtgttttatctgctgcgctactttttcgccagcgccacggcgtatacctccgccctcgcaccgatgatgattgccgctgcgctggcgatgccggaaatcccgctgccggtgttctgcctgatggttggcgcggcaattggtctggggagcattcttacaccatacgccaccggacccagtccgatttactacggtagtggttatctgccaacggcggattactggcgactgggggcgatttttgggctgatattcctcgtgttgctggtgattaccggcttactgtggatgcccgtggtgttgctttaagtgaggacggtgccggaaattgctctccggcacccaatagttttacgcagccggtaactccgccagcggccagcgcggacgcacgctaacgccgagatccgccgtcgcgcctgctttaaaccgcaccattccggcataggcgatcatcgcgccgttatcagtacaaaactccggacgcgcgtagaacacttcgccgcggcgttttttcatcatttcagccagcttcgcccgtaacgtgcggttagcactcacgccgcccgccatgaccagtcgcttaaagcccgtctgatccaacgctcgcttacacttaatcatcaacgtatcgaccaccgcatcttcaaaggcgcgggcgatatcagcacgcgtctggtcgtcggtgccgttgtcacgaatcgtgttcgccgcaaaggttttcagaccagaaaagctgaaatccagccccggacggtcggtcatcggacgcgggaaaacaaagcgcccggcagtaccctgagccgccattttcgacagtaacggtccgccaggataatccagccccagcagcttcgcggttttatcaaacgcttcaccggcggcatcatcgatagactcgccgagcagctcgtactgaccaatgccagtcacgctgattaactgcgtatgaccgccggacaccagcagcgcgacaaacggaaattccggcgggttatcttccagcatcggcgctaacagatgcccttccatatggtgtaccgggattgccggaacgttccaggcaaacgccagagaacgccccacggttgcgccaaccagcagtgcgccgactaatccagggcctgcggtataggccacagcatcaatgtcttttgccgttaagccagactcctttagcgccgcctggatcaacggtacggttttgcgcacgtgatcgcgggaggccagttcaggcacgacgccgccatagtcagcgtgcaatttcacctgactatacaattggttggctaacaaacctttttcatcgtcgtaaatggcgatgccggtttcatcgcaggaagtttcaatacccagtacacgcatgacttgttttacctcgctttattaccgcgcagtgtaggaccaatgcgggttgatgtaaaactttgttcgcccctggagaaagcctcgtgtatactcctcacccttataaaagtccctttcaaaaaggccgcggtgctttacaaagcagcagcaattgcagtaaaattccgcaccattttgaaataagctggcgttgatgccagcggcaaaccgaattaatcaaaggtgagaggcacatgccggtaattaaagtacgtgaaaacgagccgttcgacgtagctctgcgtcgcttcaagcgttcctgcgaaaaagcaggtgttctggcggaagttcgtcgtcgtgagttctatgaaaaaccgactaccgaacgtaagcgcgctaaagcttctgcagtgaaacgtcacgcgaagaaactggctcgcgaaaacgcacgccgcactcgtctgtactaattccccgagagcgttgctctccgatcagaccgagttgtagttgtaaggccgtgcttccgaaaggaatgcgcggcttattttcgtttatgaattgctaaaaatcggggcctatggctggacgaatcccacgcgtattcattaatgatctgctggcacgcactgacatcgtcgatctgatcgatgcccgtgtgaagctgaaaaagcagggcaagaatttccacgcgtgttgtccattccacaacgagaaaaccccgtcattcaccgttaacggtgagaaacagttttaccactgctttggatgtggcgcgcacggcaacgcgatcgacttcctgatgaactacgacaagctcgagttcgttgaaacggtcgaagagctggcagcaatgcacaatcttgaagtgccatttgaagcaggcagcggccccagccagatcgagcgccatcagaggcaaacgctttatcagttgatggacggtctgaatacgttttaccaacaatctttacaacaacctgttgccacgtctgcgcgccagtatctggaaaaacgcggattaagccacgaggttatcgctcgctttgcgattggttttgcgccccccggctgggacaacgtcctgaagcggtttggcggcaatccagaaaatcgccagtcattgattgatgcggggatgttggtcactaacgatcagggacgcagttacgatcgtttccgcgagcgggtgatgttccccattcgcgataaacgcggtcgggtgattggttttggcgggcgcgtgctgggcaacgatacccccaaatacctgaactcgccggaaacagacattttccataaaggccgccagctttacggtctttatgaagcgcagcaggataacgctgaacccaatcgtctgcttgtggtcgaaggctatatggacgtggtggcgctggcgcaatacggcattaattacgccgttgcgtcgttaggtacgtcaaccaccgccgatcacatacaactgttgttccgcgcgaccaacaatgtcatttgctgttatgacggcgaccgtgcaggccgcgatgccgcatggcgagcgctggaaacggcgctgccttacatgacagacggccgtcagctacgctttatgtttttgccggatggcgaagaccctgacacgctggtacgaaaagaaggtaaagaagcgtttgaagcgcggatggagcaggcgatgccgctttccgcatttctgtttaacagcctgatgccgcaagttgatctgagtacccctgacgggcgcgcacgtttgagtacgctggcactgccattgatatcgcaagtgccgggcgaaacgctgcgaatatatcttcgtcaggaattaggcaacaaattaggcatacttgatgacagccagcttgaacgattaatgccaaaagcggcagagagcggcgtttctcgccctgttccgcagctaaaacgcacgaccatgcgtatacttatagggttgctggtgcaaaatccagaattagcgacgttggtcccgccgcttgagaatctggatgaaaataagctccctggacttggcttattcagagaactggtcaacacttgtctctcccagccaggtctgaccaccgggcaacttttagagcactatcgtggtacaaataatgctgccacccttgaaaaactgtcgatgtgggacgatatagcagataagaatattgctgagcaaaccttcaccgactcactcaaccatatgtttgattcgctgcttgaactgcgccaggaagagttaatcgctcgtgagcgcacgcatggtttaagcaacgaagaacgcctggagctctggacattaaaccaggagctggcgaaaaagtgatttaacggcttaagtgccgaagagcgatcgggaagcccccgacagccgcactgagaggcagcggcaaatatataagtacgccctcgtaattatcgttggcggtaaacaaccgttggatttcagcgttaacggctgaaggacatcgggtcaatcgcccaacaccaacctcatgaaataagtgtggataccgtcttatggagcaaaacccgcagtcacagctgaaacttcttgtcacccgtggtaaggagcaaggctatctgacctatgccgaggtcaatgaccatctgccggaagatatcgtcgattcagatcagatcgaagacatcatccaaatgatcaacgacatgggcattcaggtgatggaagaagcaccggatgccgatgatctgatgctggctgaaaacaccgcggacgaagatgctgccgaagccgccgcgcaggtgctttccagcgtggaatctgaaatcgggcgcacgactgacccggtacgcatgtacatgcgtgaaatgggcaccgttgaactgttgacccgcgaaggcgaaattgacatcgctaagcgtattgaagacgggatcaaccaggttcaatgctccgttgctgaatatccggaagcgatcacctatctgctggaacagtacgatcgtgttgaagcagaagaagcgcgtctgtccgatctgatcaccggctttgttgacccgaacgcagaagaagatctggcacctaccgccactcacgtcggttctgagctttcccaggaagatctggacgatgacgaagatgaagacgaagaagatggcgatgacgacagcgccgatgatgacaacagcatcgacccggaactggctcgcgaaaaatttgcggaactacgcgctcagtacgttgtaacgcgtgacaccatcaaagcgaaaggtcgcagtcacgctgccgctcaggaagagatcctgaaactgtctgaagtattcaaacagttccgcctggtgccgaagcagtttgactacctggtcaacagcatgcgcgtcatgatggaccgcgttcgtacgcaagaacgtctgatcatgaagctctgcgttgagcagtgcaaaatgccgaagaaaaacttcattaccctgtttaccggcaacgaaaccagcgatacctggttcaacgcggcaattgcgatgaacaagccgtggtcggaaaaactgcacgatgtctctgaagaagtgcatcgcgccctgcagaaactgcagcagattgaagaagaaaccggcctgaccatcgagcaggttaaagatatcaaccgtcgtatgtccatcggtgaagcgaaagcccgccgtgcgaagaaagagatggttgaagcgaacttacgtctggttatttctatcgccaagaaatacaccaaccgtggcttgcagttccttgacctgattcaggaaggcaacatcggtctgatgaaagcggttgataaattcgaataccgccgtggttacaagttctccacctacgcaacctggtggatccgtcaggcgatcacccgttctatcgcggatcaggcgcgcaccatccgtattccggtgcatatgattgagactatcaacaaactcaaccgtatttctcgccagatgctgcaagagatgggccgtgaaccgacgccggaagaactggctgaacgtatgctgatgccggaagacaagatccgcaaagtgctgaagatcgccaaagagccaatctccatggaaacgccgatcggtgatgatgaagattcgcatctgggggatttcatcgaggataccacccttgagctgccgctggattctgcgaccaccgaaagcctgcgtgcggcaacgcacgacgtgctggctggcctgaccgcgcgtgaagcgaaagttctgcgtatgcgtttcggtatcgatatgaacaccgaccacacgctggaagaagtgggtaaacagttcgacgttacccgcgaacgtatccgtcagatcgaagcgaaggcgctgcgcaaactgcgtcacccgagccgttctgaagtgttgcgtagcttcctggacgattaatcggtaggccggatcaggcgttacgccgcacccggcactagtccctctgcacaaacgccaccttttcggtgtaatgccagtcagttaagcaactgactggctctttttcggggctgtggggtatttccagggcctctcctttaccactctcgggaaggccctttcccttctcgtcggtaatttcacaagttgtcccatacttgcaagatcgcgcatcagctccggtatacgtcccggtgaagcgccctgcaatgtcatcagcattctcatcaccattccgcatgattctgagaaactcagttgattcggccagtaacctttcagatgttccgccattttaatcatctgatatctcaccagattataagccagtaagacaccccacagctcttgctccacaagctccggctttttacttctcagcgtcagcctgctcagttgcatcgtctgttttatctccctgtatcccagttcgatttcccagcgatgactgtacagatccgccatttctcctccggggaagcgcatggcgtccgtcatcgacgtcagcagatggcagacttttcctttgcgcgtcacggtcagcaggcgggctgtcacttcatttcccagtcccggccacttttttcgtgcctgcgggctggttttcagcttcaccagatgatcgcctttacccagttttctgagctcttcatattgcgctccctttctgagaggtatcatccagtggcggtgttctcccgccaggctccaggcatttaacagtcccagtgagtaataacctttatccattaacgtcagagtgttatcgccggtttgttctataagttgctcagcaagctcattttcgctgttcttcatcgtgccgaaggctgcagccgtcagcagatggctggtcagttccatctggcagaccattttgacctgcgggtagagcgccgggttcccggcatgtgtctggcgggggaaggctgcatcgttctctggtgtatccggtgtgcgccagaacacaccatcgatggccagcagggtcaggccgcaccagtgcggatgcggcgtggcgttatgccagagctgcgctgttttcgtgaacacgcggcggacagcctcacttcccaggcgctggcgggcctgaataacggcactgggggcaacgaaggggcgattgcccggcagcatgatgtccaggcgattcacaatctggtgaagaggttctttacgctcaagcgccatgccaacaatacaccagaccatcatttcgaggggaagacggcgcttgcgtagcgttacagtacctgattcggcaaggcaacgagagatgagttcggggtcgaggtaatcccccagagaagtcagtgggttacgcagagaatcgtaacgggataccagatcaagagcctgtccaatgtgcataaaaaaatccggaaacaagtgagcgtttccggattcttacacagccactggatcggtcaactgatccttaactgatcggcattacaccttttcggtggcgttttttatcgcccacgcactaccagcgcctggtccagctcgcgatacgcttcaaccagtttctctagtgaaacgcgacttaaaccgctgggatttggcagcacccaaatctgcgtcgaaccaatggtgagcgtttgtttcccccactgtgcaccgcgctggctgaatccctgttcatatgcttgtttgcccagaatcgccaacgcctgcggctgataatcttcaattttttcaatcagcttacgcccacctgcgtgcagctcctgctttgaaacttcattggcttgcaccgttggacggtctaccagtttggtgacgccacaacgataatccagcagatgctgtgcctcctgcggcttcaactgacggtcggtaaacccggcctgatatatcaccttccagaagcgatttgctggatgagcaaagggaaaaccagtcccggcggatgaaagcccagggttgataccgcaaaacacgacccgtaaccctggagccaaaatatcctcaaccatatttactcctttctaacatcaccaggaaaagtataacggattgaaaatacattgtttataaaaacagcaggcgcacggtaatggctggattgcgacacggagttactttataatccgctaccatggccccttagctcagtggttagagcaggcgactcataatcgcttggtcgctggttcaagtccagcaggggccaccagatatagcaaaggctgacgagaaatcgtcagcctttttctttttatatatcagttactttgcgtgccagtaagccgctgcacgtacccgctgtgggtcatactgttccgcttcaaagcggcggcttaaattcttaacgactttaccttcgccggttatccagatgaagtaatcatcggcagggatttgcatctgcgccagacgcgcatctaccgcctgctcatcatgtgccagccattcgatattaaaaccatcaaggtgcgcgagataatcctgacaggcgttatcccgcacgctaaccagcgcactaacttgcggtttaacggcaagtttgctcaacgtttccaagcggcggcgcagtgcgggcattccggattcatcgcagacatacagctgatacgcgtaatcttccggcaccaccagcgaaccgcgcggacctgcaaccgtaagtttatcgcccggttgcgcctgcatcgcccagccgctggcgaccccaccgtcgtgaataaagaaatcgatcgccagttcatggcgtagttcgtcatacagcggcgtatagtcacgcgacggtgggcgtggtccttccggccagacgatgccctcttccgttaccgttggcggcacaaagtgagcgtcaggttgaggaaagaagagtttgctgtgatcgtcaaagccgcgcgatgtaaaaccgtccagcgcctcgccgccgaggacaatgcgctgaaaaccggcgctgatgcgctcaacgcgtaacacagtcagttcacggaagcgcagatcattgcgaacgcgctgcgggtagcggggggagttattcattgttatcgccttcgtgatggtaatcagatatatctaaataattttcgtaaatgataatgattgttaatcatgataaatgcaagcgatttgtagaactgatatgtctatagtctgataagacgaaccgcctcttctcaggcatcattactcaacgccggatgcggcgtgaacgccttatccggcctacgtgtgagatgagtccacatttaaaaatcatttttattcttgcaagagtgctcatatcagatataaattagatatatctaatcaagcaaaaggaggctgatatgagccatcatcacgaagggtgttgtaaacatgaaggccagccacgccatgagggctgctgcaaaggtgagaagtcagaacacgagcactgcggacacggtcaccagcatgaacacggtcaatgctgcggtggtcgccacggtcgcggcggcggtcgtcggcaacgtttctttggtcacggtgaattgcgtctggtgattctggatattctctcgcgcgatgacagccacggttacgaattgattaaagcgattgagaatctaacccaggggaattacaccccaagcccgggcgtcatctacccaacgctggattttctgcaggagcagtcgctgattaccatccgcgaagaggaaggtggtaagaagcagattgcgctgaccgaacaaggcgcgcagtggctggaagaaaaccgcgaacaggtggagatgattgaagaacgcatcaaagcgcgttgcgttggtgctgcgctgcgccagaacccgcaaatgaagcgggcgctggataattttaaagcggtgctggatttacgcgtcaaccagagcgatatcactgatgcacaaataaaaaagatcattgcggtgatcgaccacgccgcttttgatattacccaactggattaatcaccgattgccggatgcggcgtaccctacacaccccgcaggcctgataagatgcgccagcatcgcatcaggcattgtgctccaaccgccggatccggcataccgattaatgcagcaccgtcaccgcgtcttccagtcggctggcgcggtgtttcaccatcgccgacacctgcgcactctcttccaccagctcagcatttttctgggtgatcaggttaagctcatccactgcacgggtcaggctggaaagcccatcggcctgttccagcgttgaatggctaatctgggcgatcaactgggtgacgtttttcacctgtgccacaatatcttccatcgtccgtccggcggcgtgtacctgctgcgaaccggattgcaccttatcagcactggcatcaatcagcttgcgaatatcgttggcagcattagcgctgcggctggctaaatgacgcacttcccctgccaccactgcaaaacctttgccctgttcgccggcacgcgccgcttccaccgccgcattcagggccagaatattggtctgaaacgcaatatcgttaatcagcgaagtaatggtgccaatgcgctgggtactgtcggcgatatcgtccattgtcttgatcaccgtggtcatcgcctccccaccctgcactgccgcattactggcggtgatagaaagtttatcggcagccgacgccgtggcagagttctgtttcaccgacgccgccatttggttcatggtcgccaccgtttgctgaacgttatcaactgtctgctgggtatgttcgttcagttcatcggtgcctttcgccagcgtctcactgccatttctgacactggacacctggcttgagacatcgttaattagccaacggcacatcaggccaagctgccctaccgcgcgtaatgtcagccccagctcatcgctgcgattcaggtgctcaacactattacgctctccggtcgccaccttcagtgcctgacgggcgacattttctatcgggcgcacaatctgccattcaaaacaagcgcttgccaacaataccactaacacacagaggaaatacgtcaccaccggggcagcaacaaaccaaagcatggccgccagcaagataaacatcagggtcatcactccacgcgcccgccagcgaagcggtaatgaaggcagtttacccagccagcctttacgcaccaccaggcctttatgaatacgcttactggtacgtccggcgttcagcgctttgtacagcggctccaccgccgcaatctcttcatccgtcgcccgggtacgaatcgacatatagccactgatttttccctcgcgcaccatcggtaccgcattggcccgcacccaataatggtcgccatttttgcggcgatttttcacgatgccgctccagggctccccttttttcagggtgaaccacatatccgcaaacgccgcttttggcatatccgggtgacgcaccatgttgtgcggctgcccttgtaactcttgcaaggtaaagccgctcacctgcacaaaagtgtcattagcatgagtgatatagctttgcagatcggtagtggacatcagagtggtatcgtccgccagcggggtattttgctgggtgacatacggatgagaagacatgttcgcgtcctgtgcaggttatatggttgttaacttcttgtcagagtttatgtcggccccgctgcggttatctttaaccgattaatttgatttagatcgcaatttgcgattaaagcacaaatctaattctttgatttaaaatactttcactctgttactatacgaaaacgttaattatcttgcccaaaaatcaggcaattattgccctgaaaacgtgcatttgcgcagcaatcatcaaatccatacccgacaaaaaccgtgcaaaataacaacaaatgttaacagatagcattaaatattgcacaaatgataaccgaatttgtgtttatcccgattttcgcgatcgcagccggagtggcgcaatccctgcaatacttaaatcggtatcatgtgatacgcgagcctccggagcatattttgaacaggttaccttcgagcgcatcggctttagcgtgcagcgcccacgccctgaatctcattgagaagcgaacgctggatcatgaggagatgaaagcacttaaccgagaggtgattgaatacttcaaagagcatgtcaatccggggtttttagagtatcgcaaatctgttaccgccggcggggattacggagccgtagagtggcaagcgggaagtttaaatacgcttgtcgacacccagggacaggagtttatcgactgcctgggaggttttggaattttcaacgtggggcaccgtaatccagttgtggtttccgccgtacagaatcaacttgcgaaacaaccgctgcacagccaggagctgctcgatccgttacgggcgatgttggcgaaaacccttgctgcgctaacgcccggtaaactgaaatacagcttcttctgtaatagcggcaccgagtccgttgaagcagcgctgaagctggcgaaagcttaccagtcaccgcgcggcaagtttacttttattgccaccagcggcgcgttccacggtaaatcacttggcgcgctgtcggccacggcgaaatcgaccttccgcaaaccgtttatgccgttactgccgggcttccgtcatgtgccgtttggcaatatcgaagccatgcgcacggctcttaacgagtgcaaaaaaaccggtgatgatgtggctgcggtgatcctcgaaccgattcagggtgaaggtggcgtaattctgccgccgccgggctatctcaccgccgtacgtaagctatgcgatgagttcggcgcactgatgatcctcgatgaagtacaaacgggcatggggcgcacgggcaagatgttcgcctgcgagcatgagaacgtacagccggatatcctctgccttgccaaagcgctcggcggcggcgtgatgccgattggcgcgaccatcgccactgaagaggtgttttcagttctgttcgacaacccattcctgcataccaccacctttggcggcaacccgctggcctgtgcggcggcgctggcgaccatcaatgtgttgctggagcagaacttaccggctcaggctgatcaaaaaggcgatatgttgctggacggtttccgtcaactggcgcgggaatatcccgatctggtacaggaagcgcgtggtaaagggatgttgatggcgattgagtttgttgataacgaaatcggctataactttgccagcgagatgttccgccagcgcgtactggtggccggaacgctcaataacgccaaaacgatccgcattgaaccgccactgacactgaccattgaacagtgtgaactggtgatcaaagcggcgcgtaaggcgctggcggccatgcgagtaagtgtcgaagaagcgtaatatcaaatcggatggcgatacgacgtcgccatccgatctttttatacgacgcgtacgcccgcaggcatcatccgctccggcgttaacagcacgctttcactgccgtcatcggtttccgcacacaacagcatgcattccgacgtttcaccacgcattttcgctttttgcagattgcataagaccaccaccgtttttcccatcagctcctcttcgctgtagtacggcaccaggctggtcacggtttgcagtgttttttcccccacatcaacctgtacgatgtacagcttgtcggcgttttcatggcgtttcacttccacaatctttccgacgcgcatttccagacgtgcaaaatcagcgtaagccacggtttccattgcttcctcccttcaagtaaaattttactaaactatagcaaaattttttctcaatcctgtaggctaaaaatggagaatgcaggcgtgatcacattcgtaagccgctgtgttaccgttacagcgtcaaagaaacgcgctttatttactgaaaacaggtgacccgataagcacttcctctacaatgggggcgcacatcagggaaagtaaaaaaggtaaacatggcaacattaaaagacatcgcaatcgaagctggcgtatccctggcgacagtatccagggtcttaaatgacgatccgacattgaatgtgaaagaagagacgaaacatcgcattctcgagatcgccgaaaagctggagtacaagaccagtagcgcccgtaaactacagacaggcgcagtcaaccaacaccatattctggctatctacagctaccagcaggagctggagatcaacgatccttactatctggcgatccgccacggcattgaaactcagtgcgaaaagctggcgatcgaactgaccaactgttatgaacacaacggattaccagacattaaaaacgtcaccggtattttaattgtcggcaaacccacgcccgccctgcgcgccgctgccagcgcgttgaccgacaatatctgttttatcgactttcacgaacccggcagcggttacgatgcggtggatatcgatctggcacgcatcagtaaagaaatcatcgacttctatatcaaccagggcgttaatcgtattggttttattggcggtgaagatgagcctggcaaggcggatattcgtgaggtcgcctttgcggaatatggccgactgaaacaagtggtacgcgaagaggatatctggcgcggcggtttttccagttcgtcgggttatgaactggcaaaacaaatgctggcgcgggaagactatccgaaggcactgtttgttgcttccgattccattgctatcggcgtactgcgggcaattcatgaacgtggcctgaacatcccacaggatatttcgcttttcagcgttaacgatatccccaccgcgcgatttacctttccgccgctctccaccgtgcgcatccattccgagatgatgggaagtcagggcgttaacctggtgtatgaaaaagcccgcgatggtcgcgcgctgccgctgctagtcttcgttcccagcaaattaaaactgcgcggcacgacccgttaaatccccttacacactgtccggcaatcatttttgccggacagtgctgtaatgccagtcagttaagcaactgactggctctttttcggggctgtggggtatttccagggcctctcctttaccactctcgggaaggccctttcccttctcgtcggtaatttcacaagttgtcccatacttgcaagatcgcgcatcagctccggtatacgtcccggtgaagcgccctgcaatgtcatcagcattctcatcaccattccgcatgattctgagaaactcagttgattcggccagtaacctttcagatgttccgccattttaatcatctgatatctcaccagattataagccagtaagacaccccacagctcttgctccacaagctccggctttttacttctcagcgtcagcctgctcagttgcatcgtctgttttatctccctgtatcccagttcgatttcccagcgatgactgtacagatccgccatttctcctccggggaagcgcatggcgtccgtcatcgacgtcagcagatggcagacttttcctttgcgcgtcacggtcagcaggcgggctgtcacttcatttcccagtcccggccacttttttcgtgcctgcgggctggttttcagcttcaccagatgatcgcctttacccagttttctgagctcttcatattgcgctccctttctgagaggtatcatccagtggcggtgttctcccgccaggctccaggcatttaacagtcccagtgagtaataacctttatccattaacgtcagagtgttatcgccggtttgttctataagttgctcagcaagctcattttcgctgttcttcatcgtgccgaaggctgcagccgtcagcagatggctggtcagttccatctggcagaccattttgacctgcgggtagagcgccgggttcccggcatgtgtctggcgggggaaggctgcatcgttctctggtgtatccggtgtgcgccagaacacaccatcgatggccagcagggtcaggccgcaccagtgcggatgcggcgtggcgttatgccagagctgcgctgttttcgtgaacacgcggcggacagcctcacttcccaggcgctggcgggcctgaataacggcactgggggcaacgaaggggcgattgcccggcagcatgatgtccaggcgattcacaatctggtgaagaggttctttacgctcaagcgccatgccaacaatacaccagaccatcatttcgaggggaagacggcgcttgcgtagcgttacagtacctgattcggcaaggcaacgagagatgagttcggggtcgaggtaatcccccagagaagtcagtgggttacgcagagaatcgtaacgggataccagatcaagagcctgtccaatgtgcataaaaaaatccggaaacaagtgagcgtttccggattcttacacagccactggatcggtcaactgatccttaactgatcggcattacggacagtgctgccgtttattttcgtgatccagttaaagtaaatgcatttacctgccactttttagtaaaaattttactaaactccccaacaattacacaaactaccatcaccatgaatggttccgatttctctctaccgggaggccctatgaatcgctgggaaaacattcagctcacccacgaaaaccgacttgcgccacgtgcgtactttttttcatatgattctgttgcgcaagcgcgtacctttgcccgcgaaaccagcagcctgtttctgcccttaagcggtcagtggaatttccacttttttgaccacccgctgcaagtgcctgaagccttcacctctgagttaatggctgactgggggcatattaccgtccccgccatgtggcaaatggaaggtcacggcaaactgcaatataccgacgaaggttttccgttccccatcgatgtgccgtttgttcccagcgataacccaaccggtgcctatcaacgtattttcaccctcagcgacggctggcagggtaaacagacgctgattaaatttgacggcgtcgaaacctattttgaagtctacgttaacggtcagtatgtgggtttcagcaagggcagtcgcctgaccgcagagtttgacatcagcgcgatggttaaaaccggcgacaacctgttgtgtgtgcgcgtgatgcaatgggcggactctacctacgtggaagaccaggatatgtggtggtcagcggggatcttccgcgatgtttatctgatcggaaaacaactaacacatattaacgatttcaccgtgcgtaccgactttgacgaagcctattgcgatgccacgctttcctgcgaagtggtgctggaaaatctcgccgcctcccctgtcgtcacgacgctggaatataccctgtttgatggcgaacgcgtggtgcacagcagcgccattgatcatttggcaattgaaaaactgaccagcgccagctttgcttttactgtcgaacagccgcagcaatggtcagcagaatccccttatctttaccatctggtcatgacgctgaaagacgccaacggcaacgttctggaagtggtaccacaacgcgttggcttccgtgatatcaaagtgcgcgacggtctgttctggatcaataaccgttatgtgatgctgcacggcgtcaaccgtcacgacaacgatcatcgcaaaggccgcgccgttggaatggatcgcgtcgagaaagatctccagttgatgaagcagcacaacatcaactccgtgcgtaccgctcactacccgaacgatccgcgtttttacgaactgtgtgatatctacggcctgtttgtgatggcggaaaccgacgtcgaatcgcacggctttgctaatgtcggcgatatcagccgtattaccgacgatccgcagtgggaaaaagtctacgtcgagcgcattgttcgccatattcacgcgcagaaaaaccatccgtcgatcatcatctggtcgctgggcaatgaatccggctatggctgtaacatccgcgcgatgtaccacgcagcgaaggcgctggatgacacgcgactggtgcattacgaagaagatcgcgatgctgaagtggtcgatattatttccaccatgtacacccgcgtgccgctgatgaatgagtttggtgaatacccgcatccgaagccgcgcatcatctgtgaatatgctcatgcgatggggaacggaccgggcgggctgacggagtaccagaacgtcttctataagcacgattgcattcagggtcattatgtctgggagtggtgcgaccacgggatccaggcacaggacgaccacggcaatgtctggtataaattcggcggcgactacggcgactatcccaacaactataacttctgtcttgatggtttgatctattccgatcagacgccgggaccgggcctgaaagagtacaaacaggttatcgcgccggtaaaaatccacgcgcgggatctgactcgcggcgagttgaaagtcgaaaataaactgtggtttaccacgcttgatgactacaccctgcacgcagaggtgcgcgccgaaggtgaaacgctcgcgacgcagcagattaaactgcgcgacgttgcgccgaacagcgaagcccccttgcagatcacgctgccgcagctggacgcccgcgaagcgttcctcaacattacggtgaccaaagattcccgcacccgctacagcgaagccgggcattctatcgccacttatcagttcccgctgaaggaaaacaccgcgcagccagtgcctttcgcaccaaataatgcgcgtccgctgacgctggaagacgatcgtttgagctgcaccgttcgcggctacaacttcgcgatcaccttctcaaaaatgagtggcaaaccgacatcctggcaggtaaatggcgagtcgctgctgacccgcgagccaaagatcaacttcttcaagccgatgatcgacaaccacaagcaggagtacgaagggttgtggcagccgaatcatttgcagatcatgcaggaacatctgcgcgactttgccgtagaacagagcgagggtgaagtgttgatcatcagccgcacggttattgccccgccggtgtttgatttcggaatgcgctgcacctacatctggcgcatcgctgccgatggccaggttaacgtggcgctttccggcgagcgttacggcgactatccgcacatcattccgtgcatcggtttcaccatgggaattaacggcgaatacgatcaggtggcgtattacggtcgtggaccgggcgaaaactacgccgacagccagcaggctaacatcatcgatatctggcgcagcaccgtcgatgccatgttcgagaactatcccttcccgcagaacaacggtaaccgtcagcatgtccgctggacggcactgactaaccgccacggtaacggtctgctggtggttccgcagcgcccaattaacttcagcgcctggcactatacctaggaaaacatccacgctgcccagcactgtaacgagctgcagcgcagtgatgacatcaccctgaacctcgatcaccagctgcttggcctcggctccaactcctggggcagcgaggtgctggactcctggcgcgtctggttccgtgacttcagctacggctttacgttgctgccggtttctggcggagaagctaccgcgcaaagcctggcgtcgtatgagttcggcgcagggttcttttccacgaatttgcacagcgagaataagcaatgaggatcatcgataacttagaacagttccgccagatttacgcctctggcaagaagtggcaacgctgcgttgaagcgattgaaaatatcgacaacattcagcctggcgtcgcccactccatcggtgactcattgacttaccgcgtggagacagactccgcgaccgatgcgctatttaccgggcatcgacgctattttgaagtgcattactacctgcaagggcagcaaaaaattgaatatgcgccgaaagagacattacaggtagtggaatattatcgtgatgaaactgaccgtgaatatttaaaaggctgcggagaaaccgttgaggtccacgaagggcaaatcgttatttgcgatatccatgaagcgtatcggtttatctgcaataacgcggtcaaaaaagtggttctcaaagtcaccatcgaagatggttatttccataacaaataacaactacggcggcaaaaggagtttgccgccaccgctaccctactcattttcggagatgtgttatgtctgataccaaacgtaatacaatcggcaaattcggcttgctctcgctgacttttgccgccgtttacagctttaacaacgttatcaataataatattgatcttggactggcctcggcaccgatgtttttcctcgcgacgattttttattttattcccttctgtctgatcatcgcagaatttgtttcgttaaataaaaactcagaagccggtgtctacgcatgggtaaaaagttcgctgggcggacgttgggcatttattactgcctatacctactggttcgtaaacctgttctttttcacctcactgttgccgcgcgttattgcttatgcttcgtatgccttcctcggatacgaatatattatgacgccggttgccaccaccattatcagtatggtgctgttcgccttctccacctgggtttccaccaacggggcgaaaatgttggggccaattacctccgtcacttcaacgctgatgctgctgttaacgctctcctacattttactggcaggtacggcgctggttggcggcgtacagcctgctgacgccatcaccgttgacgcgatgatcccgaacttcaactaaatagctgcgcggaatagtagatcactttgagggaacttagcccggattgtgcgatctgatcaatcgccaaatcaaaacaaatcaccaaccggactgagcaatgccgatcatagcaccaatttcccgtgacgaacgacgcctgatgcagaaagccatccataaaacacacgataaaaattatgcccgcagactgactgccatgctgatgctgcaccggggcgaccgtgtcagcgacgttgccagaacgctctgctgcgcccgttcctctgttggacgctggattaactggttcacgcagtcgggtgttgagggactgaaatcattacctgccgggcgtgcccgtcgctggccgtttgagcatatctgcacactgttacgtgagctggtaaaacattctcccggcgactttggctaccagcgttcacgctggagtacagaactgctggcaataaaaatcaatgagataaccggttgccagttaaatgccggaaccgttcgccgctggttgccgtctgcggggattgtgtggcgaagggctgcgccaactctgcgtatccgtgacccgcataaagatgaaaagatggcagcaatccataaagcactggacgaatgcagcgcagagcatccggtcttttatgaagatgaagtggatatccatcttaatcccaaaatcggtgcggactggcaactgcgcggacagcaaaaacgggtggtcacgccgggacagaatgaaaaatattatctggccggagcgctgcacagcgggacaggtaaagtcagctgtgtgggcggcaacagcaaaagttcggcgctgttcatcagcctgctgaagcggcttaaagcgacataccgtcgggcgaaaaccatcacgctgatcgtggacaactacattatccacaaaagccgggaaacacagagctggctgaaggagaacccgaagttcagggtcatttatcagccggtttactcgccatgggtgaatcatgttgaacggctatggcaggcacttcacgacacaataacgcgtaatcatcagtgcagctcaatgtggcaactgttgaaaaaagttcgccattttatggaaaccgtcagcccattccccggaggcaaacatgggctggcaaaagtgtagcggtattaagcgcagctatttaggcgttcctcggcgttaccacctggatctttatggccgcaggtggcgcggagtccgtcgctgtgtacgttaacgacgtcaaaggcggttcgaaatcgttcgttaaagtgatcatcctcgccggaatttttatcggcgtactgtattccgtctcctcggtgctgattaacgtcttcgtcagcagcaaagagttgaaatttaccggcggatcggtgcaggtattccacggcatggcggcgtattttggtctaccggaagcgttgatgaatcgctttgtcggtctggtgtcctttaccgcgatgttcggttccctgctgatgtggaccgcaacgccggtgaaaattttcttctccgaaatcccggaaggcatctttggtaagaaaaccgtcgaactgaacgaaaacggcgttccggcgcgcgcagcgtggatccagttcctgatcgtcatcccgctgatgattatcccgatgctcggttccaataccgtgcaggatctgatgaatactattattaatatgaccgccgcagcgggtgatgctgccaacttactgatttagtgtatgatggtgtttttgaggtgctccagtggcttctgtttctatcagctgtccctcctgttcagctactgacggggtggtgcgtaacggcaaaagcactgccggacatcagcgctatctctgctctcactgccgtaaaacatggcaactgcagttcacttacaccgcttctcaacccggtacgcaccagaaaatcattgatatggccatgaatggcgttggatgccgggcaactgcacgcattatgggcgttggcctcaacacgattttacgtcacttaaaaaactcaggccgcagtcggtaacctcgcgcatacagccgggcagtgacgtcatcgtctgcgcggaaatggacgaacagtggggctatgtcggggctaaatcgcgccagcgctggctgttttacgcgtatgacagtctccggaagacggttgttgcgcacgtattcggtgaacgcactatggcgacgctggggcgtcttatgagcctgctgtcaccctttgacgtggtgatatggatgacggatggctggccgctgtatgaatcccgcctgaagggaaagctgcacgtaatcagcaagcgatatacgcagcgaattgagcggcataacctgaatctgaggcagcacctggcacggctgggacggaagtcgctgtcgttctcaaaatcggtggagctgcatgacaaagtcatcgggcattatctgaacataaaacactatcaataagttggagtcattaccgccgcagcgtccatgcttccgccgttattcatcatgctggcttacctgaatttacgcgccaaattagatcacctgccacgcgatttccgtatgggctcccgccgcaccggtattatcgttgtttcaatgctgattgcgatatttgccgtagggtttgtcgcttcgacattcccgactggcgcgaatattctgaccatcattttttataacgtcggcggtattgttatcttccttggctttgcgtggtggaaatacagtaaatatataaagggattaacggctgaagagcgccatattgaagcgacgccagccagcaatgttgattaagcagaataataaaaaatgagcaggcattttccctcttcctggatgaggagagggaaaatagtttctgcctttatatttttataattacaacgataaaaggctgtactttttctttagctcatggattaacacaatgaaattaatcactgcaccatgcagagcattacttgctctgccgttttgctacgccttttctgcggcaggagaagaagcacgtccggcagaacatgacgacacaaaaacacccgcaattacctcgacatcttctccttcatttcgtttttacggcgaattagggattagggggtggtggatatatggatttagagggtgagaataaacataaatacagcgacggtacctatattgaaggtggcctggagatgaagtacggctcctggttcggcctgatttacggcgaaggctggaccgtgcaggccgaccacgacggcaatgcctgggtgccagaccatagctggggtggtttcgagggcggaattaaccgtttctatggcggttatcgtaccaatgatggcaccgaaatcatgctcagtctgcgtcaggattcctcgctggatgacctgcaatggtggggcgatttcacccccgatctgggctacgtcattcccaatacccgcgacattatgactgcgctgaaggtacagaacttaagcggcaactttcgttatagcgtcaccgcgactcctgccggacatcatgatgaaagcaaagcctggctacattttggcaaatacgatcgctatgacgacaaatacacctatccggcaatgatgaacggttacatccagtatgaccttgccgaaggcatcacctggatgaacggtctggaaatcaccgacggcacaggacagctctatctcacgggcctgctaactcctaactttgccgctcgcgcctggcaccataccggacgcgccgacgggctggacgtaccgggaagtgaaagtgggatgatggtgagcgccatgtatgaagcgttaaagggcgtttatctctccaccgcttacacctacgccaaacatcgccctgaccacgctgacgatgaaaccacctctttcatgcagtttggtatctggtacgaatacggcggcggacgtttcgccacggcttttgatagccgcttctacatgaaaaatgcctctcacgatcccagcgaccaaatcttcctgatgcaatatttctactggtaataaggactgtaatttcatgaaaataaaaactattttaacgccagtaacctgcgctctgctgataagtttttccgcccatgccgctaacgccgacaattataaaaacgtgattaaccgtactggcgcgccgcagtacatgaaggattacgattacgacgatcaccagcgttttaatccgtttttcgatctcggagcctggcatggtcatctgttgccagacggccctaacaccatgggcggctttccgggcgttgcgctgctgacggaagagtacatcaactttatggccagcaatttcgaccgcctgaccgtctggcaggacggcaagaaagtcgactttacgctggaggcatacagtattcccggtgcgctggtgcaaaaactgacagcaaaagatgtgcaagtcgaaatgactctgcgcttcgccacgccgcgcacgtcactactggaaaccaaaatcaccagcaataaaccgctggatctggtgtgggacggcgaactgctggaaaaactggaagcgaaagaagggaaaccgctttccgataaaaccattgctggcgaataccctgactatcagcgcaaaatcagcgccacccgtgatggcctgaaagtcacctttggcaaagtgcgcgccacctgggatctgctgacctccggcgaatcggaatatcaggtgcataaatccctgccggtgcagactgaaatcaacggtaatcgctttaccagtaaggcgcatatcaacggttcgaccacgctctacaccacctattcccatctgctgaccgctcaggaagttagcaaagagcaaatgcagatccgcgatattctggcgcgtccggcgttttatctcaccgcctcgcagcaacgctgggaagaatacctgaagaaagggttaaccaatccggatgcgacgccggaacagacgcgcgtcgcggtgaaagcgatcgaaacgctcaacggtaactggctctcaccgggcggtgcggtgaaatttaacaccgttacaccgtcggtgaccgggcgctggttctccggcaatcagacctggccgtgggatacctggaagcaggcgtttgcgatggcgcatttcaatccggacatcgccaaagagaatatccgcgcggtcttctcctggcagatccagcctggcgatagcgtgcgtccgcaggatgtgggctttgtccccgacctgatagcgtggaaccttagccccgagcgtggtggcgatggcggcaactggaacgaacgtaataccaaacccagccttgccgcctggtcggtgatggaagtgtacaacgtcacccaggataaagcctggttggcagagatgtacccgaaactggtggcctatcacgactggtggttacgtaaccgcgatcacaacggcaacggcgtgccggaatatggcgcgacccgcgacaaagcccacaacactgagagcggcgagatgctgtttacggtgaaaaaaggcgataaagaagagacgcagtctgggctgaacaactacgcccgcgtggtggagaaaggcctgtacgacagtctggaaattccggcacaggttgctgcatcgtgggaatcggggcgtgatgatgccgccgtctttgggtttatcgacaaagaacagctggataaatatgtcgctaatggcggcaaacgtagcgactggacggtgaaattcgccgaaaaccgcagtcaggacggaacgttgctgggctactcgctattgcaggagtcggtggatcaggccagctatatgtacagcgataaccattatctggcggagatggcaaccatcctcggtaagccagaagaggccaaacgctatcgccagttggcacagcagctcgcggactacatcaacacctgtatgttcgacccgactacccagttctactatgacgtacgtattgaagataaaccactggcgaacggctgcgcgggcaaaccgattgttgagcgcggtaaagggccggaaggctggtcgccgctgtttaacggtgcggcaacgcaggccaacgccgacgcggtggtgaaggtgatgctcgatcctaaagagttcaacacctttgtcccgctgggaacggcggcgttaaccaatccggcttttggcgctgatatctactggcgtgggcgcgtatgggtggatcagttctggtttggtctgaaagggatggagcgttacggttatcgtgatgatgccctgaagctggcggatacgttcttccggcacgccaaaggattaaccgccgatggcccaattcaggagaattacaacccgctgactggcgcacagcaaggcgcaccaaatttctcctggagtgccgctcatttgtatatgttgtataacgattttttccgtaagcagtaatttgcaacggctggcggatgcggcgtgaacgccttatccgccctacatgtgcaatcccccaggccggataaaacgcggcaagcgttgcatccggcgttaccaccgggcgtattctttttgaatcccatcacaaaccccgcactccccttttcccttttctccatcgacggctaaattagaactcatccgaccacataacaattattttacatactggacaattttatgagctacccgtcgctgttcgccccgctggatttaggttttaccacgttaaaaaaccgcgtgttgatgggctcaatgcacaccgggctggaggaatacccggacggtgccgagcggctggcagcgttttatgccgaacgcgcccgtcacggcgtggcgctgattgtcagcggcggcattgcaccagatttaacaggcgttggcatggaaggtggcgcaatgctcaacgacgccagccagatcccacaccatcgcaccattaccgaagcggtacatcaggaaggcggcaaaatagccctgcaaattttgcataccgggcgctacagctaccaaccgcatctggtcgctccctccgcattgcaggcccccatcaaccgtttcgttcctcacgaactcacccatgaagagatcctgcaactgatcgacgatttcgcccactgcgcgcaactggcacgggaggcaggatacgacggtgtagaggtaatggggtccgaagggtatttgatcaacgaatttctgacgctgcgcaccaatcagcgtagtgaccagtggggcggcgattaccgcaaccggatgcgatttgccgtagaagtagtgcgtgcggtgcgcgaacgcgtcggcaacgacttcattattatctaccgactgtcgatgctcgacctggtcgaagacggcgggacttttgccgaaacggtagagctggcgcaggccattgaagcggcgggcgcgaccattatcaacaccggcattggctggcatgaagcacgtattccgaccattgccacgcccgtgccgcgcggcgcatttagctgggtcacgcgcaaactgaaaggccacgtctcgctgccgctggtaaccaccaaccggattaacgatccgcaggttgccgacgatattctctcgcgcggcgatgccgatatggtatcgatggcacgaccgtttcttgctgatgcggaactgctgtcaaaagcgcaatcggggcgagccgatgagatcaacacctgcattggctgcaatcaggcctgcctcgatcagatcttcgttggcaaagtcacctcgtgcctggtgaatcctcgcgcctgccacgaaaccaaaatgccaatccttcctgccgtgcagaaaaaaaatctggcggtggtcggtgcgggacctgctgggctggcgtttgccattaacgcggcggcgcgtgggcatcaggtaacattgtttgatgcccacagcgagatcggcgggcagtttaatatcgccaaacagatccccggcaaagaggagttttacgaaacgctgcgctattaccaccggatgatcgaagtgacgggcgtgacgctgaaactcaatcacaccgtgacggcggatcagttacaggcgttcgatgaaacgatcctcgccagtgggatcgtgccgcgcgttccgcctatcgacgggatcgatcatccgaaggtattgagttatctcaatgtactgcgcgacaaagcgccggtaggcaacaaggttgccatcatcggttgtggcgggattggttttgatacggcgatgtatttaagtcagccgggcgaatccaccagccagaatatcgccaggttctgtaatgagtgggggatcgacagcagcctacaacaggctggtggcttaagcccgcagggaatgcagatcccgcgtagcccacggcaaattgtgatgctccagcgcaaagccagcaaaccgggacaggggttaggcaaaaccaccggctggatccatcgcaccaccctgctctcgcggggtgtgaaaatgatcccaggcgtaagttatcagaagattgacgatgacgggctgcatgtggtgatcaacggcgaaacgcaggtattagcagtggacaatgtggtgatctgcgcagggcaagagccaaaccgcgcgctggcgcaaccgctgattgatagcgggaaaactgtgcatttaattggcggctgcgatgtggctatggagctggacgcacgacgggcaattgcccagggaacacggctggcgctggagatttaaatcgttattttaagcgccggatgcaacgcatccggcacgtcgcgttaatcaataaacaaggcgggagaaatgccgaatcgcgttgccaattttttagcgtgttccagcgttaatttcctcttcccgctcaaaacgcgtgacaccatagatttactgccaatttccggcagatcggcaagggttaaaccatattgatccataagggtacgaatcacggctataccgccaggcatggcttgagccatggcattaaattccgcaaattcgggcgctgattcttcccacgcggttattttggcacacaccagatccagcaaggggttttcaggatcgttgagcagcagatgatctaccagttccagcgcctgggtgtattgttcctcgttctgaatacccgccagaaaaggtgccaccgcagttagcttttctcctgcttgcaagatgtcggcaatcgcaatcattttttccccttagtacgatgaacagcggtaaagaaatcgtattctttatgcgtcataacttcacgtatgtagcacttttgcgattcaaaaaagaccattgctacaacacgtaattcattgcccccaacattgaaaacataatgcttatccagatatttgaagttatccagagatgggaatactgcttttaatgactcaggttttttgaaatatcccttagcaatcgtgttccccagagccaccaactccgttttatgttgcgggtatttttccgcagcatctttcaatgctttttgagttatcaggtgcattcttcatcacgtccgttgacaaattggcaatatgataacatccgttgacagattggcaacggatgaatttatctgtgtgacggaagaataaacgtagaaaaacgctaaacaagagaatgtagaggatggtgagagggattttttgttttatggaagcgcgattccagaactgggcagacattgccggatgcgacgcttgccgcgtcttatccggcctgggagtaacgtgctgaacgtaggccggataaggcgttaacgccgcatccggcaggtaactcccaatcttaccgacgacgccccagcttcactgctttcagcaccacaaatttattattcgtggcgatggtggtgcagttgccgaaaatcttcttcagtttatggaagtaatccaggtgacggttggcaacaatatacagctcgccgttgattttcaggcagcggcgggcatggtggaacatctcccaggcgacgttatcggtcagcgcatgttgttggtgaaacggcgggttgcagagcacagcattaaagcggaaaggctccacgccggagagcgcgttgttgatcataaactcgctgcgatctaacgcctctggcatgttggtttcaacgttcaaacggctggaagcaaccgccatcggcgattcatcgacaaacaccactttcgcctgagggtttttatcaagcagcgtcagaccaataacgccattaccgcaaccgagatcgacaatctcaccttcgagattctctggcagatgttgcataaagaagcgtgcgccaatatccagcccggtgcgggagaagacattcgcatggttgtggatagtccagtcagtaccttccagcttccagctaacggtctgcggcgcatcggccagcggcggttcattgaaagtgcaattaatcaggcgcgcttttttccatgccagcgtagtggtggtcgggccgagcactttctcgaacagctccagcgtggaagtgtgaatgtcacgggctttggcaccggcaataatacgtgtatccgacgtgaccactttgcgcagcgcacgcagttgctgttccagcaatgccagtgttttcggcactttgatcagcaccacacccggctgttgcgggtagtcggcggtgctgtcgagaaacttcacgctcgactcatcaatcccgttgaggcgtaaattctcgcgcgtcgccagttcactgatgtatgagtcgccaatgctgtacggcttatgttccgccagcgcgcagcttaacgcaccaaaggcatcattcaggatcaacaccgggccgcggatttctgtgtcgtccaactgttgcagcaaatattcatccgccgcttcccacgcctgtagcgggttaacgtcatccgtcgccggaaaacgttgtagtgtcagtgaacggaaaccgttgtctaagtggctcatcggccctcctgaatgataaaatttcgacgttgcccctgaaaagggtgcgtgagtataccctttttctctttttcgtgggcggttatgagcaatcttacttatcttcagggttatcccgagcagctactttcccaggtgcgaacgctgattaacgaacagcgtctgggcgatgtgctggcaaaacgctatccgggaacacacgactacgccaccgataaagccctctggcaatatacccaggatctaaaaaatcagtttctgcgcaatgccccgccgatcactaaagtgatgtatgacaataagatccacgtactgaaaaacgcgctcggattacataccgctgtttctcgtgtgcagggcggcaagctgaaagcaaaagcagagatccgcgtcgctactgtgtttcgcaacgcgccggaaccgtttttacgcatgatcgtggtgcacgaactggcgcacctgaaggagaaagagcataacaaagcgttttaccagttgtgctgccatatggagccgcagtaccaccagcttgagttcgacacccggctgtggctaacgcagttgtcgcttgggcaggacaaaatctgaaaatgatgtcaggcgttatcttttctttctttagcgcctaaaatcgacctcccccctttcgttaaggataacgaccatgcagccccgccttcttctccgtatttgtttttctcgccggactctaaagattacctgcttactgttacttgtggcaggagcgaccatttttatcgccgatcgcgtaatggtcaacgccagcaagcagctgacctggagcgatgtcaacgcagttccggcgcgtaacgtgggtttattgctgggggcgaggccgggtaatcgctactttacccgacgtattgataccgcagcagcgttgtaccacgtcggaaaagtgaaatggctgttagtcagtggcgataacggacgtaaaaattacgatgaagcctcaggtatgcagcaggctttgatcgctaaaggcgtaccggcgaaagtgatcttctgcgactatgccggattctcaacgcttgattcagtggtgcgtgccaaaaaggtgtttggggaaaaccatatcaccattatctcgcaagaatttcataaccaacgcgccatctggctggcaaaacagtacggcatcgacgctatcgggtttaacgcgccagaccttaatatgaagcacggtttttatactcaactgcgggagaaactcgctcgtgtcagcgcggtgattgacgccaaaatcctccatcgccagccgaaatatctcgggccatcggtcatgattgggccgtttagtgagcatggctgtccggcgaaagaataatgcgtatctgcgcacgtcgaagatgaaaaaggcgtgctacattgacgacagaatccctttatggagtatccacgcgttatgatacgtttcgctgtgattggtacgaactggatcactcgccagttcgtcgaggccgcccatgagagcggtaaatacaagttaaccgccgtatattcccgcagccttgaacaggcccagcacttcgccaatgatttttctgtcgagcatctgtttacctcgctggaagcgatggcggaaagcgatgccattgacgcggtgtatattgccagcccgaatgccctgcacttttcccagacacaacttttccttagccataaaattcatgtgatttgcgagaaaccactggcgtcgaatctggcggaagtggatgccgccattgcctgtgcgcgggaaaatcaggtggtgctgtttgaggcatttaaaaccgccagcctgccgaactttcatttgctgcgccaggcgctgccgaaagtcggcaaattgcgtaaagtctttttcaactattgccagtattcctcgcggtatcaacgttacctggatggtgagaatcccaacacctttaatccggcattctctaacggttcaattatggatatcggcttttactgcctggcgtcggcggtggcattattcggtgaaccgaaaagcgtgcaggcaaccgccagtttgttggcaagcggcgtagatgcccacggcgtggtggtgatggattacggtgatttcagcgttacgttgcagcactcaaaggtcagtgattctgtcctggaaagcgagattcagggcgaagcgggatcgctggtgattgaaaaactgtctgaatgccagaaagtgtgcttcgtgccgcgtggcagccagatgcaggatctcacccagccgcagcatattaataccatgctctacgaagcagagctgtttgctaccctggtggatgagcatctggtggatcatccagggctggcggtcagtcgcatcaccgccaaactgctgactgagatccgccgccagactggggtgatttttccggcagatagcgtaaaactataattgccaaagtaaaacagtgtaaaaggtatgtaacagaccattgactggctgaatggtctgtcatactttgttacctgcaaaggggagtaacttcattgccggtcgatcgtcattacgatgtgtgaaaaaccacatccggtcaccgggcaacccgaaaggaatacgcagacgtattccttttttgttgtaagtgagaccttgccggaaggcgaggtctatgcataaaaagcagcggctgacgtcttccgacgttggccgtttttttatgtgtaaggaacttctatgaatactgtcggcacgccgttgctatggggcggattcgctgttgttgtcgccattatgctggctatcgacctgttgttgcaggggcgtcgtggggcacatgccatgaccatgaaacaggctgcggcctggtcgctggtctgggtgacgctgtcgttactgtttaacgccgctttctggtggtatctggtgcaaactgaaggtcgcgccgttgccgatccacaggcactggcctttctcacgggttatctgattgagaaatcgctggcggtcgataacgtctttgtctggctgatgttgttcagctatttctctgttccggcggcattacaacgccgcgtgctggtgtatggcgtgctcggggcgattgttctgcgtaccatcatgatcttcactggcagctggctaatttcgcagttcgactggatcctgtatatcttcggtgccttcctgctgtttaccggcgtgaagatggcgctcgcccatgaagatgaatcaggcattggcgacaagccgctggtgcgctggctacgcggtcatttgcgcatgaccgacaccatcgacaacgagcatttctttgtgcgtaagaatggattgctgtacgccacaccgctgatgctggtactgattctggtggaattgagcgacgtgattttcgccgtggatagcattccggctatcttcgccgtgaccactgacccgttcattgtgctgacctcaaacctgtttgcgatcctcggcctgcgtgcgatgtatttcctgctggcgggcgtagcagagcgtttctcgatgctcaaatatggcctggcggtgattctggtgtttatcggtatcaagatgctgattgtcgacttctaccatattccaatcgccgtctcgctgggcgtggtgtttggcattctggtgatgacgtttattatcaacgcctgggtgaattatcggcatgataagcagcggggagaatgattcgctgtatattaagccattcctagagataactcattccagacaaaggtgagctattaattatgtaatcggcttgtagctctttacaaaaagaccgcacgggtgttggtggcgtcaaaatcgccgaagcgttccctggaggccggggcgacgcgcatggatgcgcggcgagggcgcatcttacagggacgttcccttgcgcccgacccggtagccgcaagggataagctgagggaatcgcgcagcggcgattttgttcgccagagcctgggggtgcagggggcggcggcgattggccgccccctgcgcgctccctgcgccagtgactttatatggcatagcacattaaaggagcgcaaccgttctcatattccaaatagttttgcccatatgttatctaatcagccttagtagccagtccttccctctgtttatgtcaaacaaatgtaaccattaagtttcaaaatatgacttctctttaaaatccagcatttttcgcttcccgaagctgtaactttccttatactcgaccttgcaaacactttgttacatcctgaaagatgcgtcgacagaacgcaccagggatgtgcgataacacaatgaaaggatcgaaaaatgactacgcaacgttcaccggggctattccggcgtctggctcatggcagcctggtaaaacaaatcctggtcggccttgttctggggattcttctggcatggatatcaaaacccgcggcggaagctgttggtctgttaggtactttgttcgtcggcgcactgaaagccgttgcccccatcctggtgttgatgctggtgatggcatctattgctaaccaccagcacgggcagaaaaccaatatccgccctattttgttcctctatctgctgggtaccttctctgctgctctggccgcagtcgttttcagcttcgccttcccttctaccctgcacttatccagtagcgcgggtgatatttcgccaccgtcaggcattgtagaagtgatgcgcgggctggtaatgagcatggtttccaaccccatcgacgcgctgctgaaaggtaactacatcgggatcctggtgtgggcaattggcctcggtttcgcactgcgtcacggtaacgagaccaccaaaaacctggtcaacgatatgtcgaatgccgtcacctttatggtgaaactggtcattcgcttcgcaccgattggtatttttggtctggtttcttctaccctggcaaccaccggtttctccacactgtggggctacgcgcaactgctggtcgtgctggttggctgtatgttactggtggcgctggtggttaacccattgctggtgtggtggaaaattcgtcgtaacccgttcccgctggtgctgctgtgcctgcgcgaaagcggcgtgtatgccttcttcacccgcagctctgcggcgaacattccggtgaatatggcactgtgtgaaaagctgaatctggatcgcgatacctattccgtttctattccgctgggtgccaccatcaatatggcgggcgcagcaatcaccattaccgtgttgacgctggctgcggttaatacgctgggtatcccggtcgatctgcccacggcgctgctgttgagcgtggtggcttctctgtgtgcctgtggcgcatccggcgtggcggggggttctctgctgctgatcccgctggcctgtaatatgttcggtatttcgaacgatatcgccatgcaggtggttgccgtcggctttatcatcggcgtattgcaggactcttgcgaaaccgcgctgaactcttcaactgacgtgctgttcactgcggcagcttgccaggcggaagacgatcgtctggcaaatagcgccctgcgtaattaattgtttaacccctttcgtctacggcgggaggggttttctctactttaaacggatcaattccccttttctgcatccgccagaaacgaatgatattcaagccattcataagcagaaaactaccctcaatcattgtgccgcctatcgaccccgcccagaagttgtgaatcacccagcaacacgttgaaaaccacatcacgcagcgcatggtgagccctttacagcggaacagcgcccaggtactgacaatcgtaccgataaccggcaatagttcgacaggatgatggaacttcgcgaggccaattccgccagtcagcacaataaaaatcgccattacccataagctgcgcgtgcgtaaggtaatcaatgtacgaatggcattaaggatggcactggcaccagcgggataggtgcccagaagaaaaaaatgtacgccaataacggcgctatagaccgaaagctgctttttgaagcgacgttcgtcacgattgaaaaatgttgtgataccaatcagaaaggcgatgacacccacgccctgggccagccaatacgcggtcatgataaatccttatcaggtatggaaaagcaaacggcgcttcacattatgaaacgccgttttttattaacaactcatttcgactttatagcgttacgccgcttttgaagatcgccagttcgcggaagtcgttacgctcgttgcaagtttgcttaccgttggcaaactcaacgatggtgtcgataaattcttccagcaactgcggcatcgctttaccgtggatcagctgacccgcgtcaaagtcgatccagtgttttttcttcgccgccagttcactgttggtggcgattttcaccgtcggcacaaatccaccgtatggcgtgccgcgaccagtactgaacagcaccatatggcagcccgcacccgccagggcgctggtcgctacggcatcgttacccggcgcacttaacaagttcagcccaggcgttttcagacgctcgccgtaacgcagcacgtcaaccacgacactggaacccgctttctgggtacagccaagtgatttgtcttccagcgtggtgataccgcccgctttgttccccggtgatgggttttcgtagatcggctgatcatgggcaataaagtactgtttaaagtcgttgaccatggtgaccagtttttcaaacgttgcttcgtcgcggcaatggtccatcagcaactgctctgcgccaaacatctccggcacttcggtcagtacggtagtaccgccgttagcaatcacgtagtcagagaaacgccccagcatcgggttagcagtaataccagaaagaccgtcagaaccaccgcactccagaccaaacttcagttcgctgagtttgcctggctcgcgtttatcgttgcgcatcacgttatacagctgatgcaaatgctcgatcccggcttcgatctcatcatcctgctgttggcagatcatgaaatgaacgcgttcaggatcgatatcgcccaacgtttcacggaatgcggcaacctggttgttttcacagcccagaccaatcaccagcactgcgcccgcgttcgggtggcgcaccatgttttgcagcatggtgcgggtgttgatgtgatcgtcgcccagttgtgagcagccgtaggtgtggctgaagaggaacacgccgtcggtaccttcggcgttgttggtctctttcaggaaacggttctggatttgccgcgcgatgccgttgacacagcccacggttggcaggatccacagctcgttacgcaccccgacatcgccgttagcgcgacgatagatctgcacttcacgatctgccgcttgcgcaggcagatcctgaaaatcaggttgatagcgatactgatccagatcgctcagattcgtgcgcgtattgtgggcgtggacgtgttcccccgccgcaatatccgccaatgcataaccaatcggcaggccatatttgatgacgttggccccttttgcgatatccgttaacgcaaatttatgtccacgagcaacatcctggcgcagcgtaacagtctggttatcgacactgacttctgtgccttcagccaaatctgctaaagcgaccgcgacgttatccagcgcatggatcttgatgtattgcatatcaaccccagaccttagttcagttcaatggcgaagtagtcacgcgcattgttaaagcaaatatttttcaccatctcgcccagcaggttgatgtccgccggtgcttcgcccgcttccacccagcgaccgatcatctggcacagaatgcggcggaagtattcgtgacgggtgtatgacaggaagctacggctgtcagtcagcataccgacaaagcggctcagcagaccgagctgcgccagttgggtcatctgacgttccataccgtctttctgatcgttaaaccaccagccggaaccgaactgcattttgcccggcataccttcgccctggaagttaccgatcatggtgcccagcacttcgttatcgcgcgggttcaggcagtagagaatggttttcggcagcaggttttcttcgttctgcttgctcagcagcttagacaactcttccgccatcggacggtcgttgatggagtcaaagcctacatccggccccagcagtttgaactgacgcaggttgttattacgcagcgcgccaatgtggtactgctgtacccagccgcgacgtgcatattcggcaccaaggaacaccagtaccgcagttttgaactgtgccacttcgtgctcgctcagggtttcgccagccagacggcgcgccagaatgctgtccagttccgcttcgttcgcttcagcaaacatcaccacgtccagcgcatggtcagacactttacagccgtgagcggcgaagtgatccagacgtttggtcaaggcagtttgcaggtcagcaaagcggcgaatgtcggtatcggaaacttcgcccagcttcgccatgtagtcgttaaaggtcgcctgttcgatgttgaaggctttgtccggacgccagctcggcagcactttgatggtgaaagagccgtctttggcgatctctgcgtgatgctccagagaatcgatcgggtcatcggtggtgccgaccattttcacgttcatctgctgcatgatgccgcgcgcggagaagttatcctgcgccagcagttcgttacattcgttccagatttcatcggcagttgacggagaaagcaatttgccagtgataccaaacggacgacgcagttcaaggtgcgtccagtggtataacgggttgccgatagtgtgcggaacagtcgccgcccaggcgtcaaatttttcacggtcagatgcatcaccggtacacagacgctcggccacaccgttggtacgcatagcgcgccatttgtagtgatcgcctttcagccagatgtcatacaggtttttaaaacgatagtcttccgcaatctgctgcggcggcaaatggcaatggtaatcgaaaatcggctggtcttttgcgtagtcgtgatacagacggcgggcaaattcggtatctaacaggaaatcttcagtcataaacggagtcattttcgtcttcctctcaacgagtgagctagcttgcttatggtgcgatgctgacaaagttatcacaccaatttccagagtccgaagatattttcgtgagttagatcaataaacgtagttaaaaaaattactctcaaagtgataaatctcgctgcaggccgcgccagtactggcctcgctgtcgtcaggtaatgtccctacaaatattcgcacatttgtgatggctctcaccttttaaagttgtatgacaagttatctttctgccgtcgcaaatcataagtcgacggaatgcaaattgccgattcattcatttgttagatgaatcgggttaaccggtacggaagccgaattagcacgaaactttcatggcaacgttcggggcgtgccggttttttttcggttacccggtcgtaactaacatcttcagcctctggcgggatgatggccgcgcttcctgcggatataacaaaacgatgaggttttacatgcgtaaaattaaagggttacgttggtatatgatcgcactggtgacgctcggcaccgtgcttggttacctgacgcgtaacactgtggcggcagctgcgccaactctgatggaagagttaaacatctccacccaacagtattcctatatcatcgcagcctattctgctgcttatacggtcatgcaaccggtagcaggttatgtactggatgtgctgggtacgaaaatcggttatgcaatgtttgctgtgctgtgggccgtgttctgtggtgtaaccgcgctggcaggtagctggggtggcctggctgttgctcgtggtgcggtcggtgccgcggaagcagcgatgatcccggcgggtctgaaagccagctccgaatggttcccggcgaaagagcgttccatcgcagtaggctactttaacgtaggttcttcgattggtgcgatgattgcgccgccgctggtggtatggcaatcgtgatgcacagctggcagatggcatttatcatctccggtgcattgagctttatctgggcgatggcatggctgattttctataaacatccgcgcgaccagaagcatctgaccgatgaagaacgcgactatattattaatggtcaggaagcccagcaccaggtgagcacggcgaagaaaatgtccgttggtcagatcctgcgtaaccgtcagttctggggtatcgcactgccgcgtttcctggcagaaccggcctggggtacttttaacgcgtggatcccgctgttcatgtttaaagtttacggctttaacctgaaagagatcgcgatgttcgcctggatgccgatgctgtttgctgacctcggttgtatcctcggtggttacctgccgccgctgttccagcgttggtttggtgtgaacctgatcgtttcccgtaagatggtcgtaacgctgggtgctgtgctgatgattggcccgggtatgatcggtctgttcaccaacccgtatgtcgcaattatgctgctgtgtatcggtggttttgcccaccaggcactgtctggcgcgctgattacgctctcttctgacgtgttcggtcgtaacgaagtggcgacggcgaacggtttaaccgggatgtccgcatggctggcaagtacgctgtttgcgctggttgtcggtgcactggctgacaccatcggcttcagcccgctgttcgcagttctggcagtatttgacctgctgggtgcgctggttatctggaccgtattgcagaacaaaccggcgattgaggtggcgcaggaaacacataacgatcccgcaccgcaacattaacgtttaacgtttaacgtaagttgtaatgacgaagccgccttatcaggcggcttcgttgtttagttttttctggtctgcggggtcaattgatggttggcaaggaaggcgtaaagattactgacaatttgcccatgtagtacccggcctgtttatccatcacgctgaatttatcgactgccagagtcaagggtgtcggcacacacatcacggcatagcgaataccgggcagtaccaccggacgcacacgtttcaggttaatgctgttccagaccatattttcattattgcgcacatcaatttgcccaccggtttccgggttgtacattttgacccggtaatcaatgcgttctccctcgtcggtggtggtccctccttgacgatagatagagaagtcaccgtctctgcgccctgcagctggtcgcccttcatctttgagcatgatttcataactgatggcattaccgttaaaaccatcgtacaggcacatgtccaacatggtcagatcttgcgcgtagttgctgccgttaacgcttcctgttggatgcaagtctaactgcacccttggcgtggcgtgggcgaactccgggaagaacacgtcaatatggttggggtcgagcgtattcagggtaatatttgcgaaatagtcctgggccgggctgttcgaatgtaatttaactttccccttccagacgccaccaatcggcaaattcttcatctctgtctgctcaaggtagagcgtaagaaactttgtatcgtatatataataatgttgaccatcttctgtacatgaagatctattagaatccttaagattcgtctgaagccctttgccccccttgcatcctggcggcgcttcatcgctacttacaatggctgttttaaatcctttgagttttaccggccaacgcatcccactgcgttgttcagttaaatagatttgtactgtcgatatatttccattagctgtacaggtttgttggaggtcaggatacgaacattcataccacatatatccattatttcctgccgacgcttcatccttccagaagtaataatccgctctaccagatgccaaatcatacgtaatttcactggtcacgtcaggagctgcctgaacgccaatgagcgtgccaaacaagcccaatatcgccgcaatcaatcgatttctcatggtgcaacctccctttgcgccgtctgaacgtttccacgtaatttaggctgtttcaactgtgcctgaacctgaatcgactccggtaattgtgaataagtcaccacactacaagtaacatctccgctgtaacgaatgctggcgcgtttctttacaacactcagtggacacttaaggaattgctgcccggaaagcagatagagctctttttcgctgccgttaatttcaagtgtaaatcctccatcttcagctaccagtaacatggcgctgttcagccccacaatcgggaattttttcaccgctgccggcagtaataaacgaccgatatagttgtagttaaagctggcagacacttcgcgatagcgcagcttgccaggcaacaacattaattcacgattccctgcaccgttaatgatgtttgttgtcccctgctgattgccctggctactgtcgttaacctcaacaaaaccagactgaaatccaggataagggaacaacacactgtcactttgaccaagctgcaaagttcggctgcctgccacccgcgcttcgagttgcagatcctgactctcttcatcctgttcagagaagcctttcacatccaccagtaccgcacccagcaaatcgtctgtaccactggctcccaaattaacgccatagcaactgacagccagcgtagagctataagtgcccgtaaaggccgaaagatgatcatgattcttacggtcataactatcagatacggtagcgtagacatttccgtattgcccatcccaacgcccgttaaccgcgctgtttatggtatcggtgttcaggcctccgacggttacgccaagttctttatggctgaatgaatcgttataaaaggtatgcgataactgccatgacgtttgatcgccatcctgttcgctataacgataatccgtagacacatttgttgaatggctgttgttattgctatccatcgttggcgtgtcagataacgaaaacgataagtacaagccgttgtcgtcgttatcgccaccgttgtcattacgatggaaaacaccgactgacgtactcaaaatccagtcacgcatcacaaaagcgcgggaagcgctaagttgtacagtttcagagatactttgcgctgttgtctggcgaagatagttattttcaaagctctgctgtttatcccaacgcaaactatcatcagtgttattttgtgtgcgggtataacccagcatcatattccagccgacaaaattctgtgaaaccgtcgcggaaatactttcataacagcttaaggcgttatagctctctctgctgtcggttgtacaagcatcgccgtcagagttggtccgataaaagcccaacgtcggccatcccggattactccagttggcctgttgcatatcacctttgccgccgtcatcgttacggaacacgctggcgctgattgcaagattccccaccccgcctaaatctgccgtccagttattacctaactcgaaagcactcacatcatcggcattcgccagccctgcgtagagctcatattgcggatgtaatggcaggcgtactcctagctgataagctgaactttcatcatcagaaacctgtgatgtagttttacctgcctgtaagaaccattgcgcatttccgtcagtcagaccgccggttttggtaaacggcacaagctcggtgcgggtgagttggttattttcgtagacttttaatgccacgctgtagctgcctggcggaaaggaactggtatcaataaattgcgaaccactattgagataaaacgatcccaaaagttgctcattacgataagcgtcaacacgagaattgcgcgaaagcagaaccattactggggttccttgctggctttgcgcctggtttaaatagctcagtgtcgacccgatacgcatcccatcaattgcaccgagtggcagaaagttaaaggtaaagttcccgccttgtgcattaaatagtgtgcggttgtccatgcgacccgcctgcacataataacgacgtaaaaaatcataacgataatagagatcgctgacgtcagcattactgtcactgacatcatctgcatcataaccgttgaaattccagtgtgcaccaatataactattttctgttattcccagcgcaccgtttccctgaatagacaacgattggtaatcatcctgtgccagaacattgatgtcttgctgatgtataaaagcattaacagtatttttgtctggatttaaatataatgacttcgcatcgaaagctgaattccattgcggattaataaacaacgttgccgaactttcttcatcattatagattatttccagcgtatcggtattcagaaaaccacaccctgagtcagtacgtacataaccgcaagccaattcaccgtggcgagctagcggctgcgataatttttctttcactatatgcgcgattttctgatcgtctacatccagttccagcttgttatatagacttgctggatcaagaaatgttacggtatcaagattaaccattgcataatatttaccgagacttttccctgaaaaataaacctcgatatactcctgctgtccctgagcaataacctcaaaccctgcgggaatttcggttaatgtcgcctctgccgggctgagactcgccaggatcaaaagagccagtaattttttatccatggcaatcctgaaatccataacaaatactaaaacagttaaaataagggagggctacccctccctttgttacgtgttaattctgttatctggattagatatcctgagacagataaatgcttactacaccacggtagatgcctgtctccagaacacctttggtggtttgagcaaacatcaggtttttagccagagaaccgttagttaacgcatcggaagcaaagattttggttgcggtaaaagtggttgccgcatcagctttaatttcttcaccgccccaggttactgtcagcggaacaatcttgctagcatccaggctttgaaccagttgcgccggggaaactaactgcatttttacatctttggtaacgtcgttagaccagattttggtcatcaactggtaagattgcagaccctgccccggcagatattgcatttctactgctttcggcaacgcggtgttatcggtctgtgtcatatccagagcggcatcaacgttggccgttacagtaatatccttttgtactgccaatgcggagcctgcaacagaaaacatcgctgcgaccagaagagattttgcaaatacctttttcattactattccttcgtttattacaatgataattaatggaccgccagttcaaactcgccattatctttggtgatccagttattatatttgacaacgattttgtcgtagccagatatgctttcaagatttctttcctgaccaaggaagatgtttttatttacggtctgtatcttacaattttctttgctattatttttacaataagcgatcgttaaaatctttaagcgttgattccctgcattaactaatttttgggcagcatttacttctaacttagcaataggttgctgaggtggaacactaacaacaatcccccaaattaagttaactgttaactgcatagagagatcttttttatctgtggcaacgtcatcaatactgggaaccgcttcaaatttaacgcgataatttttttctttttgctctggttccattgcaacaaagcgcacagttttgctactaccggctggtaaagcgaatttaggtggcataacaaccagatgatttgcatcaccggatttaatctcaacttcattttcctgaggcgtcgatggattatcgatacggaatactgtcgccttgatgtactgaacttcattacttttagatattacgcgaacgttgccttcaccctgactattaatggaaacagccataggataaacagtcatatttgactgtgccaaaaaaggagcgaacacgaataaaagcggcgtaagccgtgataagagattaattttcgccaccatataaatttgatcttacaatattgtttccaaaaagttggtgtattagagatgtagatttattgtaagtcaatataaaaaagcatttttagttaatattaaatttaaaggctgggaattaacttactgaaatttagtagctttcacaatgacgatacttattttttaggaatttataaatattcacaatattaattcaatacattaattcaatcaccaaatttatatatgaccaatggcatacccatgaataaagtggtatgataacttcgtccgcattccactccgggagacgcatatggaaatcactgaaccacgccgtttgtatcaacaacttgccgctgacctgaaagagcgcattgaacagggcgtctatctggtgggtgataaactgcctgccgaacgctttattgccgatgaaaagaacgtcagccgaacggtagttcgtgaagccatcatcatgctggaagttgaaggctatgtggaggtgcgtaaaggttcaggtattcatgtggtttccaaccagccgcgccatcagcaggcggctgacaataatatggaattcgccaattacggtccgtttgagttgcttcaggctcgccagctcatcgaaagtaatattgccgagttcgcggcaactcaggtaacgaaacaagacatcatgaaactgatggccattcaggaacaggcgcgcggcgaacaatgcttccgtgattccgagtgggatttacagttccacattcaggtagccctggcgacgcagaactccgccctggcggccatcgttgaaaaaatgtggacccagcgtagccataacccgtactggaaaaaactacacgaacacattgattcccgtaccgttgataactggtgtgatgaccacgatcaaattctcaaggcgttaattcgcaaagatccccatgctgctaagctggcaatgtggcagcatctggaaaacaccaaaatcatgttatttaacgaaaccagcgacgatttcgagttcaatgccgaccgctatctattcgccgaaaacccggtagtgcatctcgatacggccaccagtggcagtaaatgaaactcctgtccgacaggcgctgcgacgcgcctgttcgcttcgtcggtaagcgaaaagtataaagtgtcagcctgtgtaaatcctctcgccaccctcccctgcattcagcaaaatcagactccacggacatgtaattttgataacgaacaacgttgacctttgttacaattagattcaatttgaatttatgtttttgaatgctttcttatctcacgatttaacagggaatagttcaggctgtgttgatgtatcaaacccgcagaacataccaaaacagcaataacattgcggtagtgcatcttttaaaaccagcgtggcgttaaccgattcaccaggaataatgaatggaacttttgacccaattgctgcaagccctgtgggcgcaggattttgaaaccctggccaatccatcgatgattggcatgttgtattttgtcttgtttgtaattttgttccttgaaaacggcttgcttccagcggcctttttaccgggcgacagtttactggtattggtcggcgtgttgattgcgaaaggcgcgatgggttacccgcaaacgattctgctgctgaccgttgccgccagcctcggctgctgggtcagctatattcaggggcgatggctgggcaatacccgcaccgtacaaaactggctatctcatttacccgcgcattatcatcaacgcgcacaccatctttttcataaacacggtttatcggcgctgttaattggtcgctttattgcgtttgtcagaacactgctgccgacgattgccgggttatcagggctgaataacgcgcgctttcagtttttcaactggatgagcggtctgctgtgggtattgatcctgacaactctgggttacatgctcggcaaaacgccgatatttttaaagtacgaggaccagctgatgtcatgcctgatgctgctcccggtggtgctgctggtgtttggcctggcaggttctctggtcgtgttatggaaaaagaaatatggaaatcgggggtaagggatgcaaatacctcgcatgtcgcttcgccagctagcctggtccggcactgttttacttctggtcggcacgctgttgctggcctggtccgcggttcgccagcaagagtctacgctggcgattcgtgccgttcatcaaggcacaacgatgccagacggtttttcgatctggcatcaccttgacgctcatggcattcctttcaaaagtatcacccccaaaaacgacactctgttaattacatttgactccagcgaccagagcgccgccgcaaaagcggtcctcgacagaacattgccccatggctacatcattgcgcagcaggacaataacagtcaggctatgcagtggctgacccggttacgggataactctcatcgcttcggataacttcctgttatccgaaacatatcactcactttggtgatttcaccgtaactgtctatgattaatgaggcggtggttaacactaccgcttcgttgtctggacaatcgttcctttgtaataggtccgaatcacaatggaaggttcaagaatgaaataccgcatcgctttagctgtttctctctttgctcttagtgccggtagttatgccactaccctgtgtcaggaaaaggagcaaaatatccttaaggagatcagctatgccgaaaaacaccaaaaccagaatcgtattgacggtctgaataaagccctgagtgaagtccgggccaactgttcagatagccagctgcgtgccgatcatcacaagaaaatcgcaaagcagaaagatgaggtggcggaacgccagcaagatttagccgaggcgaagcaaaaaggcgatgccgataagattgccaaacgcgaacggaaactggcagaagcgcaggaagagctgaaaaagctggaagcgcgcgactactaactcacaatagtcactacttactcacctggagaaaactatgtcgaaagaacacactacggaacatctgcgtgctgagttgaaatccctttccgatacgctggaagaggtgcttagctcatctggcgagaagtcgaaagaagagttgagtaagattcgtagcaaagcggagcaggcactgaaacagagccgttatcgcctgggtgaaaccggtgatgccatcgccaaacaaacccgtgtcgcggcggcgcgtgctgatgagtatgtgcgtgaaaatccgtggaccggcgtgggaattggcgctgcaatcggtgtagtgctcggcgttctgctgtcgcgtcgttaattatggcggacactcatcacgcgcaagggcccggtaaaagcgttctgggcatcgggcagcgaattgtttccatcatggttgaaatggtggaaacacgtctgcggctggcggtggtggagctggaagaggaaaaagctaatctctttcaacttttactgatgctgggcctgacgatgcttttcgctgcatttggtcttatgagcctgatggtgctaattatttgggcggttgatccgcaatatcgcctgaatgcgatgattgccaccaccgtggtgttgctgctactggcactgattggcggtatctggacgttacgtaaatcgcgtaaatccaccttgctgcgccatacacgccatgagctggcaaacgatcggcaactgctcgaggaggagtcccgtgagcagtaaagtcgaacgtgaacgacgtaaggcgcaactgcttagccagatccagcaacaacggctggatctttccgccagtcgtcgtgaatggctggaggcaacaggcgcttacgatcgtcgctggaatatgctgctaagtctgcgctcctgggcgctggttggcagtagcgtgatggcgatctggacgattcgccatcctaatatgctggtccgctgggccagacgcggttttggcgtatggagcgcctggcgtctggttaaaacgaccctcaagcagcaacagcttcgcggttaacttccctctggccggagcaattccggccttatccctcaaattttttgaagatttttgacagttttccttgctaacaatcatcattcaccacgtttatgattctctccatcgacagcaacgacgctaataccgcgcccttgcacaaaaaaacaatcagcagcctgagtggcgcagtggagagtatgatgaaaaaattagaagatgttggtgtactggtagcgcgcattttaatgccgattctgtttattaccgcaggctggggaaaaatcaccgcttactctggtacccaacaatatatggaagcaatgggtgtcccgggttttatgctgccgctggtgattctgcttgagttcggtggtggtctggcaatcctgttcggtttcctgactcgcaccacagccctgtttactgcgggctttacgctgctgacggcatttttatttcacagcaactttgctgaaggcgtcaactcgctgatgttcatgaaaaacctgacaatttctggcggattcctgctgctggcaattaccggtccgggcgcgtatagcatcgaccgcctgctgaataaaaagtggtaagcacgcgctatacttaacgataaaaaacgaggaggaagctcctcgtttttgctattggaggagagaaaaatgggtcaactgattgacggcgtctggcatgacacctggtacgataccaaatctaccggcggtaaatttcaacgttcagcttccgcatttcgtaactggctcactgccgatggcgcacctggccccactggcacaggcggttttatcgcagagaaagatcgttatcatctctatatttcactcgcctgcccgtgggcgcaccgcacgctgatcatgcgcaaactcaaaggactggaaccgtttatttccgtttccgtagtgaacccgctgatgctggaaaacggctggacctttgatgacagttttccgggagcaaccggagatacgctctatcaacatgaatttctgtatcagctttatctccacgccgatccacactacagcggacgagttactgttcccgtactgtgggacaaaaagaaccacaccatcgtcagcaacgaatcaacagaaatcatccgcatgttcaataccgcgtttgatgcgctgggcgcgaaagcgggtgattactacccaccagccctgcaaacgaaaattgacgaacttaacggctggatttatgacaccgttaacaacggcgtgtataaagctggttttgccaccagccagcaagcctacgacgaggcggtggcgaaagtgtttgaatcgctggcgcgactggagcagattttaggccagcatcgttacctgaccggcaaccagctaaccgaagccgatattcgcctgtggactacgctggtgcgttttgatccagtgtatgtgacccacttcaagtgtgataagcaccgcatcagcgattacctgaatctgtatggcttcctgcgcgatatctaccagatgccggggatcgccgaaactgtcaatttcgatcacatccgtaatcattacttccgcagccataagaccatcaaccctacggggattatttcaattggtccgtggcaggatctcgatgaaccgcaggacgagatgttcgcttcggttaaaaaaaggcaccttacgaagtgcctctgataattagctaagtgcatgttgttcatatcggatgcggcgtgaacgccttatcaaacctacaaaacatttatattcaatatgttgcaatgaccgcgcaggccagataagcgtagcgcatctggcgattttgcgcttgtcatcagtcttagcgcgccttcacagcactttattaattccttgaacgaatatttactgccatttcattcacgtctattcttaatttgctgctttaaaaacaagtgattgagcaaaattgaggcaaaaatggactggtatctgaaagtaataaaaaattatgtcggtttccggggtcgtgcgcggcgcaaagagtactggatgtttattctggtcaacatcatctttacgttcgtgctggggctgctggataaaatgttaggctggcaacgcgctggtggcgaaggcatcctgacgacaatctacggtattctggtgtttttaccgtggtgggcagttcagttccgccgcctgcacgacaccgaccgctcggcgtggtgggcactgctattcttaatcccgtttatcggctggcttattatcatcgtctttaactgccaggcgggtacgccaggcgaaaaccgctttggacctgatccaaaactggaaccttaaaacaaatctgctcgccggatgtctgactcatccggcttttatcatcatgttgatgaatgaataatttactaatgtttatttaaaatatttcaatgtcgttatataaattacctataaaaaataaccatgtatttatcttaaatatcaaaacctttataacatccgaaaaagaaagatacgaatagcatttacacaatacccggaatagactttcgtcacttttaattaaagggatgtttttatgcagtggtatttatccgtattaaaaaattatgttggtttctctggtcgcgcacgtcgtaaagagtactggatgtttactctgattaacgccatcgtcggcgctattatcaatgtcattcaattgattttaggtctggagcttccatatctgtctatgctttatttgctggcaaccttccttcccgtccttgcgcttgctatccgtcgcttacacgataccgaccgttcaggtgcctgggccttgctcttttttgttccgtttattggctggctcgtgcttctggtttttttctgcacagaaggtacttctggcagcaatcgttacggaaacgatccgaagtttggttcaaattaatcttagaattggggcgatatttcgcccctttttattaacaataataaatattattttccgctaaaaagtttgggaatttcccgcagacaccaggatttcgcttcccccatactgtcacgacgccaggccataataatatcgatctcactggtcgattccgggctgacgacacgcaaccgcccttccgcaatatctttttcgaccatcggatacggcatcgtcgccacgccaagccccgccagtaatgcctgacgtttatcttcaatcgtgctcaccgttaagcgcggctgtttgtccagcagttgtacggtcaacaccgggcgctcacgagcggtatccgctaccgcaattccacgatatttcacgcgcgtcacttcagataacggttccggctcctgatgaatcgggtgatcaggcgcggcaacgtagacgttcattaacgtatagagcttgcgcgagttgatctccgacgaggaacgaaaatgcatatccggcgcgataacaatatccgcccgcccctgctccagtcgttcctacgcccccgccagcacttcggtgatgattgccagttgggtattggcttttgccgccagtttgtcgattaacgggaaaaaggcaggtgtcggtaccagcgcttcggtcacaatggtgagatgcgtttcccaaccgcgcgcgagggcttccgcatcggtagtcagtttatctgcggcttccagcaaaacgcgccctcgctccagcaacatcctcccgacattggtgaatttggtgcgatggcccgagcggtcaaacagcaccacatccagctcttcttccagtttttgcatggtgtagctaagtgcggaaggcacgcgtcccagctcatccgccgccgccgcaaaactgccccggcgatcgcatccataacccgtagtgcttccagcgttaatgccctttctttggccatttcgttctcattcaggaaatttgaacataccgggcagaatatctggctaacaatgtagcgtccagccccttaccataaaaggaagtaaagagaggtcaagaattatgattactacccgaactgccaggcagtgtggacaagcagactacggatggttgcaggcccggtatactttttcctttggacactacttcgacccgaaattgttaggctatgcctccctgcgtgtgcttaaccaggaagtgctggccccaggtgccgcctttcagccgcgaacctatcccaaagtcgatattttaaatgtgattctggatggagaagcagagtatcgcgacagcgaaggcaatcatgttcaggccagcgccggtgaggcgttgctgctctctacccagccgggtgtcagctacagcgaacacaatctcagcaaagacaaaccgttaacacgaatgcagctttggctggacgcctgcccgcagcgagagaatccgctgattcaaaaactggcgcttaatatgggcaagcagcaattaatcgcctcgccagagggtacgatgggaagcctgcaattacgccagcaagtgtggctgcaccatatcgtgctcgacaaaggcgaaagtgcgaatttccagttgcatgggccacgcgcgtatttgcaatcgattcacgggaaatttcatgcgcttacgcatcatgaagagaaagcggcgctgacctgcggtgatggggcgtttattcgtgacgaggctaacattacgctggttgccgattccccactgcgcgctttgctgatagatttgcctgtctagttgtttttacagggagatgatgatgagtaaaaaatcggccaaaaagcgccagccagtgaagcccgtggtggcgaaagaacctgctcgcaccgccaaaaattttggctatgaagagatgttgagcgagctggaagccatcgtcgcggatgctgaaacgcgtttagccgaggatgaagctaccgcgtaaagacaggttgccggatgcggcgaaaacgccttatccggcctacaaaatccaacaacattaacgaattaaacaacccgtaggccggataaggtgcgccagcatcgcatccggcacaatactcaaaacctggcgtttatctggccttgctcgccataatctcgataatctgccgatccgtttgctgcatcgaatggcttgctaacgcacacaggttggcaatcgactgctcaacatcatgcgccacgatcccttcattgccggtcacggcggtatcatccagcgccattaacaccgctttccacgcagccgaagcactggtcgaaaccttcatcgcgcagctgttcgacgcaccatcgcaaatcatgccgctgacatcgccgatcatactgctgatcgccatcgagatagtttcataacgcccatccaccagccatgccatcccggcggcggcccccattgctgcggtcgttgcggcacaaagtgcagacaaacgcggtaactggttatggatgtaaattgcgctcaaatgagaaagcatcagcgcacgcgccagtcgttcatcatccgctccgaagtgttctgctacaaccaccacaggcattgttgcggtgatcccctggttacccgagccggagttactcatagccggaagcgtagcgccgcccatacgcgcatcggatgccgcgctggtacgaatcacaatggatgaagagagatctttcgccagcaaaccgcgctcgcactgtttttccagcgtcgcgccaatatgcagcccccacttaccgctcaaaccttcctgcgataacgcacaatttagcttcgcggaatcgagaataaagcggatcgccgcaaacgggacttcattgacgaacttcaggatctcagccagcgtcgttctggaaagcaccgtcagcggagactcttgctcgccctctgccacacacgcctgctgggtaaacaccacaccattgtgcgtctcaatatgcacaatgttggtatgcccgccgacgatggtgacacacgcccacttctcaccgttccagactttggcgcgtgagaagaggatttcattgcaaggttcctggatcttaacggagactttccccgccgccagcagtgctttggcatcggcaattgcctgcgcagttgcgtctttcagcacttccagcccggcgttggcatttccacctaacgcccccagcgccgccgcaatcggcagccccaccattcccgtgccgggaacggtgacgcccagaccgttcttcatcagatttggcgaaacccaggcttctacacgttcaaccggaccttccagttctgccgcagcaaccgccgccgccagcgccagtgaaatcggttcagtacatcccagcgccggttttacttcctcctgaacggcgaggatgtaacgctgccataacggatttaaagtcgaatcaaacatattaaaaaccttaaaatttcaggtaaatcaagaaaatgccaggaacggagaaacacaaagcaacaaaccagtgacgataatcaggtacagagacatccctttgtatttgtgcaatgccggtactttgtaaaccagccacgccgggatcaggcaccctaccatgccgaaaatcgggctacagatagaggtgaagctcaacaccggtgcgttcagtacgatagcgctccaggccagcaaaatggcgaaaatcatgatgccgcgctgaacaagattttcgttaatcttctcggcaggcatcttgcgacgcaggatgttcattacgatcccttgcgttgcttcgcgaaagcctaaatagacgccaaagaatgcagtcatgacagcaaagatattgagaatgacgctgaccactttcacccacgctgcgccgtcaccgctaataaactgtgcggcaatcgccagcgcggaaatattctgctcgtaggcttttaccgcttcgtcatgccccatcgccagcgtgaacgacacggcgtagaaaaagacggtgacaaacaaaatgccaaacgcgatattcattgcccgcaatgctttatgccgcgccacttcaatagatttttcccgcgagcgataagagatcaccatcgggcttaacgtctggataaacaaaatcgacgtcagggtaaacggcagcgtaataatggcgtttttcaccagcagccccagcggcggtagcgaaccgacgttatacagatgccacattcccaccatcgacacgcccagcgccgcgaccaccagcagcttggtcagcaccatgccggtcgaaattttgaataacaatttctcgccgcgtgaagagatcgccaccagaatgcaaatcagtaccagaccataaaagggactgtctgacagcaacccttccgtcacgccgaaggtatgcagataggaagcactatcgttggtgatggcggtggaatagacgaacatccaaatcaccagcattacgaaatagaacgcacctaacaggatgccccagtttttacctaaataaccgctaatgacactcgggtaatctttacattctggtgattctgccagcgtattaataaacaaccgctgaaacagatacattgccgggtaaccaatcaccgatgagagcaaaaatacccacaatcccatcaaaccgacctgcaccgggagaaaaacaatccccgcgccaatcgccatcccgatactcataatcacccagccggtgtcagtactgtcgaatttgatcgcttctcgccactcgctctcactcattccagcacgacccgccggggtcgaagcgtctgcaatgacgcctttattcgatgcaatttccataatttctcgctcaatattttgtagggcttattatttttttccgagccgcatcaaggcgatatgcggtctacgtttttgcaggcgagttattagaataaagaaatgatacgcgcgaggtcagagaaaatcttcacaatcaagactttgaaataacggagatggataagaattttctactaaattaatcgcaagagaatattcattctctatttgcggcagatcacaaaaaaaaggtgcacatttgtgcacccaaggatgaaagctgacagcaatgtcagccgcagaccactttaatggccagtcctccgcgtgatgtttcgcggtatttatcgttcatatctttgccggtttcatacatcgtctcgatcactttatcgagtgaaacacgcggtgccgaggtgcggcgcatcgccatccacgcggcgtttactgctttcacggcattaatggcattacgttcaatgcacgggatttgtacctgtccggcaaccggatcgcaggtcagcccaaggttatgctccatcgcgatttccgccgcattgcatacctgcgccggactgccgcccagtagttcagttaaccctgccgccgccattgaacaggccacgccaatctccccctgacagccgacctccgcgccagagatggaggcgttcattttatacagcgcgccaatagcccccgctgccagaaaatagcgggcaattgaccgctcgtttaccggacgacggaacttatcgtaataagccagcactgccggaataatgccgcacgcaccgttagtcggtgccgttaccacgcgcccgccagctgcgttttcttcactaaccgccagcgcgtacatgttgatccagtcgatgacattcatcggatcgttagagatgttatcgctagaaaccagctgacgacgcagcgctacggcacgacgcggcacattgagcggaccaggcagcacgccttcagtgttcatcccgcgttcaataccgtcatgcatcacttgccagatacgggcaaatcctgcgtcaatttccgctttgctgcacagcgccagctcgttgtgcatcatcaggccagatatagacaggccgttgtaatcacacattttcagcagttcacctgctgagtggaaatcgtaaggtacggacgtttcgacatcgtgcgacaggccgaagtgttcttcttcgacaataaacccgccgccgacagagtaataggttttacttaatagcgcttcctgtcccttccaggcagtgatccgcattccgttctcatggcgaggcaacatttcgggatggaagataatgttctttgctacaggaaaatcaacaatatgcgcaccagatgccactggcagccgcccgctgcgcgttactaactctataaatgcagggatctcatcaatgacaacatcctgcggactgtttcctgccagtcccatgataatggcgacatccgtggcatggcctttgcccgtcagtgacaacgacccatacagatcgaccacaatatggctcgtcgcggttaataagccgctactttccagccgatcaataaaactttttccggcattcattggccccacggtatgcgaactggagggaccaatcccaattttgaaaatatcgaatgcactaatcatatccacaccctcggattgccgttcagtgaagtggagcggaacgaccttgcgaccgtcccgctcacgaggctttacgcactacgtactgcgatagcttcaatttccagcttcacatctttcggcaaacgcgcaacctgcacacagctccgggtcgggtaggtcgcctgatgctcatcgaagaactgcttatagacttcattgatggtggcaaaatcattcagatcggtgatgaacacggtcatcttgatgatatcgcccacgctcagcccggcagcaaccacgatcgctttgacgttttcgaggcttaaacgcgcctgatcttgcacatcagccgggatctcaccggtctgcgggcaaaccggaatttgcccggaggtgaagaccatgctgcctaaatcaacgccctgaacataagggccgattgcgcctggggcacgttgcgtttcgataatctttttcatacatcctccggcgtcagagcgcctgggtaaaagtacgtgaaataacatcctgttgctgttcacgggtcagtgcgttgaagcgcacggcgtagccagagacacggattgtcaggttaggatatttttccgggtgctcgatggcatccagcagcatttcccgattcattacgttgacgttgaggtgttgaccgccttcgacatccgcttcgtggtggaaatacccatccagcaggccgacaaggttggttttacgtactggatcttctttgcccagcgccgcaggaacgattgagaaggtgtacgagatcccatctttggcgtaggtgaacggcagtttcgccaccgacgtcaatgaggccacggcacctttgcggtcacgaccatgcatcgggttagcgcccggcgcgaacggtgttccggcgcgacgaccgtccggcgtattaccggttttctggccgtacaccacgttagaagtgatagtcagaatcgactgggtagggacggcgttgcgataggttggcagcgctttaattttcttcataaagcgttcaaccaggtcgcaggcaatgctgtctacgcgctcgtcgttgttgccgtactgcggatattcaccgtcgatttcaaagtccaccgccaggccgttttcgtcacggattggtttcacgcgggcatatttgatggcagacagggagtccgtcgccaccgacaggcccgcgatgccgcatgccatagtgcgatagacatcacgatcgtgcagcgccatcagcgaagcttcgtagctgtacttgtcgtgcatgtagtgaatgatattcagcgcgctgatgtactgcaccgccagccagtccatgaagtgatcgaggctgtccatcactttgtcgtaatccagcacgtcgtccatcagcggtgctgttttcggcccgacctgaatcttcagcttctcgtccaccccgccgttaattgcgtacagcagtgttttcgccaggttagcgcgtgcaccaaagaactgcatttgcttaccaatcaccattgggctgacgcaacaagcaattgcgtaatcgtcgctgttgaagtcagtacgcatcagatcgtcgttttcatactgcaaggaagaggtgacgatcgacacctgcgcggcatattttttgaaggcaatcggtaattcttccgaccaaagaatggtcaggttaggttccggtgccggccccatagtgtgcagggtgtgcaaatagcggaaggagtttttggtcaccagcgtacgaccgtccagccccatcccgccgatcacttccgtcgcccagattgggtcgccggagaacagcgaatcaaattccggcgtacgcaagaagcgcaccatacggatcttcataatgaagtgatcgatcagttcctgtgcctgctgctcattgagtacgcctgctttaaagtcgcgctcaatgtagatatcgaggaacgacgccgtgcgccccagcgacatcgcgccgccgttctgtgatttcactgccgccagataagcgaagtagagccactgcaccgcttcctgcgcattctgcgccgggcgagagatatcaaagccatatttcgccgccatttcctgaatctgcaacagcgcatgacgatgctctgccagctcctcacgcagacggatggtggcttccagatcttcgcctttttccagacgggactggagatcggcaaattgcagttcgcgttcacgcaccagataactgatgccatacagcgctacgcggcgatagtcaccgataatgcgcccacggccatagccatctggtaaaccggtcagcacgccagatttacggcagcgcagcatatccggtgagtaaacatcaaatacgccctggttatgggttttacgcagatcggtaaacagatattcaaattcactgtccatttcacggccataggcgtggaatgaacttttaatcatattaatgccaccgaacggatgcagcgcgcgctttaatggcgcatccgtttgcagaccaacaattttttccagcggctggttaatatatcccgcatcatgagcggtaattgtggtggcaatattggtatcgaaatcaaccggcgcgtgggttgcgttttcgatacggatgccttccattactttttcccacaattccgtggtggcaggcgtcgcttcggcgaggaaagattcatcgccttcatacggtgtatagttatgttgaataaaatcgcggacattaatttcgtttttccagtccgtacctttaaagccaagccatgcgtcggcgtacagcttatcgctggtatcaatatctatcttcatgaaaaataatctctctacaatacttcaactaaattatgcaaattctgcgggcgcgttaactttgcctaaatgaatggcatccaaagcaatcattttttcttcgttagtcggaataacggcacaaatgacacgcgcattttcactggaaacaattcgctctccaaaagagttagagcgattattcatttctgtatcaatcactacgcctaatacagccaaatgttccatgaccagacgacgaattaaacttgaattctctcctattccgccggtgaatataattccatccaggcgacgtaatgaagctgcgtgtccggcaatatgacgggcaattcggtgaacaaaggttttaattgccagttgcgcgcgttcgtgaccttcatgccaggctttttccagaacacgtaaatccgaagaaagaccggaaatacctaataatcccgactctttattcactacgcgttccaggtcacccaggctctggttggtttggctggcgacccaggacatcgcaccaaagtcgacatcgccactgcgggttcccatcatcaagccttccagcggcgtcattcccattgaagtatcaacactctgaccgttgcgaaccgcgcagattgacgcgccattgccaagatgcgccacaaccaggccggagtcatcttccgccagattcagcagagaatgtgcgcgctgggaaacatagcggtgcgacgtgccgtggaaaccataacggcgtacacctaactcttcataatatttccacggcaggccgtataaataagcttccggagccatcgtctggtggaaactggtatcaaataccgccacctgagttacgcccggaaataattgctgcgccgattcaataccacttaaattggcgtaattatgcaggggtgccagtggagaaacgcgacggatattatcaatgacttcatcggtaataatggcggactcggtaaaaatactgccgccgtgagcgatgcggtggccaattaaggccacactgtcatttaaattccgtttttccagttcaaatgcaattgccttcaatgcaccttcgtagctgtggtgagccagcggtgctggctctcccccatttacggataagaatgcattttccgagttaataccgtcggcaatacctgacattaatacttcacagtcgctggcatcgagcacggaaaacttaatcgaagacgaaccacagttaataaccaaaacaaccggaaattcattcatctcttttctcatcctgagttacggattaaaacagtttgtatacgatgttcaggatggtcagcagaccaatcacggtaacaaacacgttatccagacgaccacggtatttcgccagagacggcgctttacggatggcatacatcggcaacaggcacagcagggatgcgataatcggtgcgcccatggcttcaatcaggtcgaggatgttcgggttggcgtaggcaacaacccaggtggagcccatgatgaagatcatgctgatagtgttcagtttacccagcgacactttagttttgtcgcctttataaccaaacttcaggaccaggccattcagaccttccagcgttcccagatagtgaccgaagaaagatttgaagatagccacgagtgcgatgatggaagccgcatattccagtgtaatcgcgaacgttgttttggtaccggtcatggacgcaaagtggttagccagataagaaagcactggaatattctgcgctttggcttccgccatgttggccggagacagcgtaaataggcagctaaaggcaaagaacatcaccactgcaaccatcagcatgctggcacgagaaatgatttgggaacatttacgttcggtgaagtcgcgaccgaagtctttctcatactcttcacgtttagaaaccacgaaggaagagacgattggcgagaaattaaaggagaaaaccatgatggaaatccccagccagacggtgatcaggataccgtcatgaccggttaacgacagcgaaccgaggtcaacctggtcgataactgcagagttccagtaagggatcagcgacagagaaatcagcaccaggctggcgataaacggccataccaggtagctcatcactttaaccatcagatccttaccaaaccagatgacgaaagccatcagcagcagcaggaacagcgccacaaagccgcgattcagcggtgcaaagccgagctggttttcccagaacgtcataaaggtattggtaatagtaacgccataaatccacagcagtgggcaaatcgcgaagaagtacaggaacgtgataaccacgccgccagttttaccaaaatgctcttccaccgtttccgtaatgttgccggaagggttagagccagaaagacatagacgcgccagcgcccggtggcaataaaatgcgatggggtatgccaataccaacatcagaagaatcgggatcagtccgccaaaacctgcgcggatagggaagaacagcaccccggcgccgattgccgtaccaaacaagcctaacgtccatgtggtatctgatttacgccaggacgattgttttgtctggctggatacaatgctatctgaagtactcatatcctatcctcaacgaattaattaagcgtcaacgaaaccggtgatttgagagacgcgagaaagatcgatattgccgccggaaataatactgacggtttttctgttttgaatatattggtctaatttaccgcttaataatgcagcacatgccagagcgcctgcgccttcggtgacgactttattgcgctgaattaaggcaatcatactgtttctgatttcgtcttcgctgaccagcacgatgtcatcgactaattcacgaacgatttcgtaagttaaattacccgggcgggagacatcacaaccatccgccagggtgccggtagttcggtgcgtggttatttctccggagtggaaagaagccgccatgccgtgaacgttttcagactgtacgccaataacacgaatggtcgggttaatagatttaattgccaccgcaataccagcaattaaaccgccaccaccaattggcacaatcacgttatcgacatcatagagatcttccataatttccagaccaatcgttccctggccagcaatcactttcggatcatcgtaaggtgggataaaaatacggccttccatttcgacaatttcgctcactttagcgatagtgtcgttgaagttatcaccatgcagaacgacttctgcggagtagtcgcacgttgccgctactttggattttggcgcaccttttggcatcaccactttaccgtcgatacccagcatcgcgcaggagagcgaaaccccttgcgcatggttgcccgcagaacaggccaccacgcctttgcgtttttccgcatcggtcagtgaacttaatttattaaatgcgccacgaattttaaatgaacccgtacgctgcatattttcaaacttcaggaatatttcacctttgcaacgttcactaaaatagttggagcgaggcatgcctgttttataaattcgcccagccagtcgttgtttcgcttcaataatatcatcaatagcaatcggcagatcgtatgtaatatgcattataaaacctcttcgcctgaattaaatatgtaggtaaccgtaaccgacacctgcaaaacagacaggtggattatttatgtttaaataaaaacaaataactaaccaacttctattaattgccttcgtctacacccattataagatgaatactctttggctaattccaccaaaaccgatgctgcttttttaatacgataatttttcgaccataccgcggcatattgtgccacaggtaatgtttcttcaaccggaatagtaataaattgattagaaccaaaaggtgacgtcatatcacaaggaattacagttaagaaatcagcattgagaacaagattataaattgtcacgactgagtcggttttaacgatgttttcaatactgatgccatttctttgtaacgtagtaagcagttcgctgtagtaccccatattagtttgtggcaacacccactgttcgttcttcaacgactccagcgtggtggtgccggtgcatgttcgggacttactggctaccagcacaaactcggactcgaacagcggctcaacatgtaaatcctgaagcttcatttctgcacttaacgtaccaatcgcaaaatccagtcgaccgtcgcggattgccggtaagaacgaagacagttgcgcttcatacatagaaacctgcgctttcgggaacacctctttgaacttgttgatcatccctgacataaaagtaaaaccaatcaatgaaggaaaaccaaatgagacttccaccaccgcctcagaagacataccgcttatctcattaaccatatttttcatttcacgggtaatggattcggaacgggagagtaacaattgaccggcaggtgttaatgttacaccggtatttttccgcaccactaattccacaccaaaataatcttcaatatcgttaatgattttactgacggccggttgagttaaccctaattcttttgcagccgagccgatagagccacttctaatgacttcctgaaagactaccaggtgctgcgttttcggaagaagaatagtgctcataacgacctacgttaattacctcattgacggcatgaagtgtatcaaaatgaaatgaacaggatatgtgcgaccactcacaaattaactttcaatactttccagggtatcgtcattacaattaaatacctttaaatatcaacaagttaaagcataaaaatcagcataaaccctgatttttgtcaaaaaaaatgacggggataaccatattttatggcgataacatcattcgttatgtggttaatacaaaaaaggggctgagaccatatttcaagcaattaccggataattaccaggcaaaatttgagttaaatttaatgagcaagttctcaaattttattataaataaaccattttcagcgataaatactgcggcacgtcacattttttcacgctatttgttggagaacaaacatttattttatcaatattttaaaatttcgaatacaggtattgatcatctcgaacaattgattaacgtcaactttttctcttctgacaggacgtcattttgtgaatgcaatcgttttccataaattcttctcccctcataggcgacgaatagcattttgtgttgaggatcacaaaacgaataattgctgatcgccgcgataaggtcagacaaagacaacaagggaaattttcacagagcttttgatcgtcgtaggccacagaatgttgcttcgtttactgtaacgccgggtaaatgagcgttttttgatagtgcgaaagaaccctgcgaggaaaataagcatctattattgtttgtcatgacgacaaggcaggcatcaatgaaaggcttcccaattgcacatatttttcacccttcaatcccgccaatgcacgcagtggttaacaatcacaatagaaatattgattattggacggtaaaaagaaagtttgcagaaattgggtgatgctgccaacttactgatttagtgtatgatggtgtttttgaggtgctccagtggcttctgtttctatcagctgtccctcctgttcagctactgacggggtggtgcgtaacggcaaaagcactgccggacatcagcgctatctctgctctcactgccgtaaaacatggcaactgcagttcacttacaccgcttctcaacccggtacgcaccagaaaatcattgatatggccatgaatggcgttggatgccgggcaactgcacgcattatgggcgttggcctcaacacgattttacgtcacttaaaaaactcaggccgcagtcggtaacctcgcgcatacagccgggcagtgacgtcatcgtctgcgcggaaatggacgaacagtggggctatgtcggggctaaatcgcgccagcgctggctgttttacgcgtatgacagtctccggaagacggttgttgcgcacgtattcggtgaacgcactatggcgacgctggggcgtcttatgagcctgctgtcaccctttgacgtggtgatatggatgacggatggctggccgctgtatgaatcccgcctgaagggaaagctgcacgtaatcagcaagcgatatacgcagcgaattgagcggcataacctgaatctgaggcagcacctggcacggctgggacggaagtcgctgtcgttctcaaaatcggtggagctgcatgacaaagtcatcaggcattatctgaacataaaacactatcaataagttggagtcattaccccattaatgaaccgttaaaaaaccaggaaatatcggtgatgctgccaacttactgatttagtgtatgatggtgtttttgaggtgctccagtggcttctgtttctatcagctgtccctcctgttcagctactgacggggtggtgcgtaacggcaaaagcactgccggacatcagcgctatctctgctctcactgccgtaaaacatggcaactgcagttcacttacaccgcttctcaacccggtacgcaccagaaaatcattgatatggccatgaatggcgttggatgccgggcaactgcacgcattatgggcgttggcctcaacacgattttacgtcacttaaaaaactcaggccgcagtcggtaacctcgcgcatacagccgggcagtgacgtcatcgtctgcgcggaaatggacgaacagtggggctatgtcggggctaaatcgcgccagcgctggctgttttacgcgtatgacagtctccggaagacggttgttgcgcacgtattcggtgaacgcactatggcgacgctggggcgtcttatgagcctgctgtcaccctttgacgtggtgatatggatgacggatggctggccgctgtatgaatcccgcctgaagggaaagctgcacgtaatcagcaagcgatatacgcagcgaattgagcggcataacctgaatctgaggcagcacctggcacggctgggacggaagtcgctgtcgttctcaaaatcggtggagctgcatgacaaagtcatcgggcattatctgaacataaaacactatcaataagttggagtcattaccggaaatatctacaggcaatatcaatgttaattgcccattaaaaaatatttacaatgaaatcaggaggttgaacgtaatttttagttgtgggactggagatatagttgatctatcctctctggacttacgtaatgtcgatttagattattacgattttacagataaacatatggctaatactattttaaatccttttaaattggattcaacaaattttactaatgccaacatgttccaggttaattttgttagttcaacacaaaacgccacaatctcctgggattatttactaaaaataacgcctgttttaataagcattagcgatatgtattctgaagaaaaaatcaagtttgtcgaaagttgtttaaatgagcttggagacattaccgaagaacaattaaaaattatgagatttgcaattataaaatctataccaagggcaactcttacagataaattagaaaatgaattaacaaaagaaatatataaaagctcatcgaaaatcaacaattgcttgaacagaattaaattaccagagatgaaagaattctcatcagaaaaaaatatatgattacatcgatataatcattgaagattatgaaaatatcaaagaaaatgcttatctggtcgatccaaaaattaattacactatagatttaaacatagaagactctagctcagaggaattcctttttgataatagcctcgagaaagacgaaaattcttcggacaattgctttgaggtcgaaaaatataacgcatatgaagcatataactcagagaatctatattttaccagagaggaatatacgtatgattacgaccttttaaatgcaatatagacataataacttcttacaaaatctataattaataccgtagatattcattcatcttaccctgtgcaccaaaagcaaaaactcactgacgcgggtttgaaactgatggcaaccgcaaaaatgcctgatgcgctacgcttatcaggcctacgccatctctacaatatattgaatttgcgtgcttttgtaggcaggataaggcgttcacgcagcatccggcatgaataaagcgcactcaacaatctgaaacccgccggaacggtttattacgtacatcaggtgaaactgaccgataagccgctttcttttgggtatagtgtcgtggacagtcattcatctttctgcccctccaaaagcaaaaacccgccgaagcgggtttttacgtaaatcaggtgaaactgaccgataagccgctttcttttgggtatagcgtcgtggacagtcattcatctttctgcccctccaaaagcaaaaacccgccgaagcggttttttacgtaaaccaggtgaaactgaccgataagccgctttcttttgggtatagcgtcgtggacagtcattcatctttccgctcctccaaaagcaaaaacccgccgaagcgggtttttacgtaaatcaggtgaaactgaccgataagccgggttctgtcgtggacagtcattcatctaggccagcaatcgctcactggctcaagcagcctacccgggttcagtacgggccgtaccttatgaacccctatttggccttgctccgggtggagtttaccgtgccacggactgttaccagccgcgcggtgcgctcttaccgcaccctttcacccttacctgatcccgcttgcgcgggccatcggcggtttgctctctgttgcactggtcgtgggtttcccccccaggcgttacctggcaccctgccctatggagcccggactttcctcccctccgcccgtctcccccgaagaggacgacgacgaagcggcgactgtctggtcagcttcggcgcgcagtatagagggtttgcgcgcccttgtcaccccgcgttgcgcattccaatcgccagtgtcgcggcgatattacgtgaagcacggcagatattgtcataagccccgcggaatgcttcgtccaacgtacctatgctggtcaatacgctgaagaccgcatcgatgccatgctgatgtacaacgccaacatcatcggtcaggctacccgcaatgccaatcaccggtttatggtacttcttcgccacgtttgcaacgccaatcggtaccttgccgtgaatactctggctgtcaatacgcccttcaccggtgatcaccagcgtacaatcgtgaatatgttcttccagattcagcgccgtagtgacgatttcaataccacttttcagttccgcaccaagaaacgccatcagcgccgcgcccataccgcccgcagctcctgcgccggggacatctttcacatcaacatgcagcgcttttttaatgacatcggcatagtgagagaggttattgtccagctcaacaatcatcgcttcactggctcccttttgtgggccaaagatgcgcgatgcgccgttatcgcccaccagcggattggtgacatcacaagcgacgcgaatgacgcaatcttttaagcgcggatcgaggccggaaatatcaatatcattcagagtattaagactaccgccgccaaaaccaatttcattgccgttggcgtcgcataatttcgcccccagcgcctgtaccatgcctgcgccgccatcatttgtagcgctgccgccaatgccgataataatgtttgttgcactgctctccagcgcctgcaggattaactcgcctgtgccgcgtgaagtggttacgagtggatcgcgtttttccgcaggtaccagctccagcccactggccgccgccatttcaataaacgcggttttgccatcgccggagatcccccaactggcattcactttctcgcccagcggccctgtaacccaggcgtgacgttcagccccctgggtggctgcaatcatcgcttccaccgttccttcaccaccgtcggcaaccggaacagaaacatactgtgcatcaggaaaaatttcccgaaatcctttttctatcgcctgcgcaacctcgctggcagataaactttctttataagagtctggggcgattacgattttcatacctatgcctgttaccacatgacgccggagggcgtttctcttattcggcctagattccaggcccggattgcaatacaccatccgggcacgacgtcattaacgagtaacttcgactttcgccagtttttcgtagtagcacgccagggcgctatgatccgccgttcctaaaccatctgcacgcagtgcctgcatcatctccataaccgcagctgtgagcagcagttgtgcgccgacgccgtgagaagtatccagcgcattcgccagatccttaatatgcagatcaatgcggaagcccggcttgaagttgcggtccatcaccatcggcgctttggcatccagcacggtactgcccgccagcccaccgcgaattgcctgataaaccaggtccgggttaacgcccgctttggttgccagcgttaacgcttctgacatcgcagcaatattcagcgccacaatgacctgatttgccagtttggtgacgttacctgcaccgatttccccggtatgcaccacggaacccgccatcgctttcatcaaatcatagtatttgtcgaaaatagccttgtcgccgcccaccatcactgacagcgtaccgtcgatggctttcggttcaccgccgctcaccggagcatccagcatatcaatgcctttcgctttcagcgcttcgctgatttcacggcttgccagcggtgcgatagaactcatatcgatcaataccgtacctggcttcgcgccttcaataatgccattctcacccagcgccacctctttcacatgaggggagtttggcagcatggttatgatgacgtcgcactgttcagcgatcgctttagccgtagacgctgtttctgcacctgcagcaatcacgtcagcaatagcttctgggttacggtcagcaaccaccagcgagtaacctgctttcagaaggtttttactcattggtttacccataatccccaggccaataaaaccaactttcatagtcatatcaaccatctctcttgttgcggtggtggttattttttaaaggtatcagccagtttctgagtggcagagcggaagacgccaagatcgctgccgacagccacaaacgtcgcgccccattccagataacgacgcgcatcggcttcgaccggcgcgagaataccgctgggtttgccgtgcgcgctggcacggttaaaaatatgctgaattgctttttgtacatccggatgcgaggcattgccgagatggcccaatgccgcagccagatcgctggggccgacgaagataccgtctacaccttcggtagcggcaatagcatcgacgttatctacgccctgctgactttctatctggaccagaatagtaatgttcttgttcgactgagcgaaataatccgccacggtgccaaacatattggcgcggtgagaaacggagacgccgcgaatgccttccggcgggtaacgagttgatgccaccgcctgctctgcttcctcttttgtttctacaaaaggaatcaggaagttatagaaaccgatatccagaagacgcttaataattaccggctcgttggtcggcactcgcactactggcgcgctggcgctgcctttcagggccattaactgcggaataaacgtggaaatatcgtttggcgcatgttcgccatccagcaccagccagtcaaacccagccaaaccaagaacttcagtgctaatcgggttagagagtgctgaccagcaaccaatttgtacctgtttcgcagccagtgcggctttgaatttattcgggaaaacatcgttattcatcgcttatacctttgcttatttctgcaattccatacgtttaatgtcgccaactacgaagaggtagcagaccatcgccatcagcgctgaacatcccacgaaaaccagtgctgcattgaaggagtgcagttcacttaccaggtagccaatcaccagtggagtgacaatggaggcaacattgccaaagacgttaaagacgccgccacagaggccaacaatctctttcggcgcggtgtcagaaatcaccggccagcccagagcaccaaatcctttgccaaaaaaagccagcgccatcagcatgaccaccagcgtggtgttgttggtgtagttacataagatgatggtggaaaccagcaacattcccagcacaatcggtagcttacgtgccagggtcagggataaaccgcgtttgatcagataatccgagaagacacctcccagcacgccgcccgcaaaaccacacagtgccggaatcgaggcgaccagacccactttcagaatcgacatgcctttttcctgcaccagataaatcgggaaccaggtgaggaagaaccaggtgatggtgttgataaaatattgtccgaaaaatacgcccaacatcatgcggttagagagcaattgcttgatgtaatgcagtttgggaccgcttgctgccgcgctgcccggctttttgtggtccatatcgaccaccgcgccattttcagagataaacttcagctcttccgcagacatacgtgggtgatctgtcgggttatgaatcaacttgatccacagcgccgtcagcacaaaaccaatcccccccataacggtgaagacgtgctcccagccccaagcgaaagtcagccagccaagcagcggcgaaaagagcgccagcgagaaatattgcgccgagttaaagatggcggaggcagtaccacgttctttcgtcgggaaccaggcggcgacaatacgggcgttcgccgggaatgatggcgcttccgagaaccccagcataaagcgcataaagaacatggagatccctgcccaggccagcgggaacatatcaacaaagccttgcaggaaggtgaacagcgaccagaaaaagaggctgtaggtgtaaacttttttcgagccaaacttatcaagcaaccagccgccggggatttgcatcagcaagtaggcccagccaaaagcagagaagatgtaacccatcgaaaccgcacttaactgcaactcttttgccacttcggtaccagcaatagacagcgttgcacgatcggcgtagttaacggcggtaacaataaaaataatcagtaatattaaatagctggtatgcacgcctttcttttttacgtcaacggtgtccagaatcattttatttacctcgggtacttatgctgatttttattattatggggaaggtgttatttatgagttttatttatgccgttacgacaatgaactcgggaattagtataagcagcgggagaataataatcattgtgcaaatgctaatttaatcagtactatttaaatattattttgagcatatgcacataaggttgcgcgctaaagcacagatttgcgctttaccttaccgggcggcactgcaatccctgaaatgattgacattgatcacatttctgcgtttaaactcctgacattcttatttcacccaatgaagtcatttatttttaaatgagaccagatcctcattttaataacccctggctggagaatattgcacaatggccaacatcgaaatcagacaagaaacgccaactgcgttttatataaaagttcacgacacagataatgtggcaattattgttaatgataatggcctgaaagcaggaacgcgttttccggatgggctggaattaattgaacatattccccaggggcataaagtcgcattgctggacattccagctaatggtgaaattattcgttatggcgaagtgattggttacgccgtgcgcgcaatcccacgcggaagctggatcgacgaatcaatggttgtactaccggaagcgccgccgttacacacgctgccactggcaaccaaagtcccggcccccttaccgccgctggaaggatacacctttgagggctatcgcaatgccgatggcagcgtgggcaccaaaaacctgctcggcatcaccaccagcgtccactgtgtggcaggcgtggtggactatgtagtaaaaatcattgaacgcgatctgctaccgaaatacccgaacgtcgatggcgtggtggggctgaatcatttgtacggctgtggcgtggcgattaacgcaccggcggcagttgtgcctattcgtaccatccacaatatttcgctgaaccctaactttggcggcgaagtaatggtgattggtctgggttgtgaaaagttgcagcctgagcgcctgctggtcggcacggatgatgtgcaagctattccagtagaaagcgccagcattgtcagtttgcaggatgaaaagcatgtcggctttcagtccatggtcgaggatattttgcaggtcgccgaacgccatctacaaaaactgaatcaacggcagcgagaaacctgcccggcttcagaactggtcgttggtgtgcagtgcggtggcagcgatgcgttttctggtgtaacggcaaacccggcggttggctatgcgtctgatctactggtgcgctgcggcgcaacggtgatgttttcagaagtaacggaagtgcgtgacgcgatccatctgctgacaccacgcgcagtgaacgaagaggtcggcaaacggctgctggaggagatggagtggtacgataactatctcaatatgggaaaaaccgaccgcagcgccaacccttcgccgggcaacaagaaaggcggtctggcaaatgtggtggagaaggcactcggctccattgctaaatcgggtaaaagtgcaattgttgaagtgctgtcgcccggtcaacgcccgactaaacgcggattaatttacgccgcgacgccagccagcgattttgtctgtggcacgcaacaggtggcttcgggtatcaccgtacaagtgtttacgaccggccgtggtacgccgtacggcctgatggcggtacccgtaattaaaatggcaacccgcaccgagctggcgaaccgctggtttgatttaatggatattaacgcgggcactatcgctaccggcgaagagagcattgaagaggtgggctggaagttgttccactttattctcgacgtcgccagcgggaagaagaaaaccttctcggatcaatgggggctgcataaccagctggcggtgtttaacccggcaccggtgacctgatttcttttggaacgtccctcgcaaaacatggccttagtgccatgtttttattgtttaaagcccccacgtccattaataatgcatttgcattaccttagttcaagcttataatttgagcagaaaacaggctgtaaaaggacaatgaatcatgcccgctaatgctcgctctcacgctgtactgaccactgaatcaaaggtcacgatacgcggacaaacaactatccccgcgccagtgcgtgaggccttaaaactgaagccaggccaggacagcattcattacgaaattctgcctggtgggcaagtatttatgtgccgactgggagatgaacaggaggatcatactatgaatgcatttttgcgttttctggatacagatatccagaacaacccgcaaaaaactcgtccattcaacattcaacattcaacattcaacattcaacattcaacattcaacattcaacattcaacattcaacattcaacattcaacattcaacattcaacattcaacattcaacaaggaaagaaacttgtcgctggcatggacgtcaacattgatgatgagattggcgacgacgaataatggattttccacaaagggttaatggttgggcgctatatgctcatccctgttttcaggaaacctacgacgctttagttgccgaagtcgagacattaaagggaaaagatcctgaaaattatcagagaaaagccgccacaaagttattggcggtagtccataaagtgattgaggagcatatcacggtcaatccatcatcaccggcattccgtcatggcaagtcgttaggctctgggaaaaataaagactggtcacgggtaaaatttggtgcaggtcgttatcgtctcttctttcgttatagtgaaaaagagaaagtcatcattctgggatggatgaacgggtaatgactccaacttattgatagtgttttatgttcagataatgcccgatgactttgtcatgcagctccaccgattttgagaacgacagcgacttccgtcccagccgtgccaggtgctgcctcagattcaggttatgccgctcaattcgctgcgtatatcgcttgctgattacgtgcagctttcccttcaggcgggattcatacagcggccagccatccgtcatccatatcaccacgtcaaagggtgacagcaggctcataagacgccccagcgtcgccatagtgcgttcaccgaatacgtgcgcaacaaccgtcttccggagactgtcatacgcgtaaaacagccagcgctggcgcgatttagccccgacatagccccactgttcgtccatttccgcgcagacgatgacgtcactgcccggctgtatgcgcgaggttaccgactgcggcctgagttttttaagtgacgtaaaatcgtgttgaggccaacgcccataatgcgtgcagttgcccggcatccaacgccattcatggccatatcaatgattttctggtgcgtaccgggttgagaagcggtgtaagtgaactgcagttgccatgttttacggcagtgagagcagagatagcgctgatgtccggcagtgcttttgccgttacgcaccaccccgtcagtagctgaacaggagggacagctgatagaaacagaagccactggagcacctcaaaaacaccatcatacactaaatcagtaagttggcagcatcacctacaagccgtgccccatttattataaccccaccgctatttcgtattgaagctggcgatgactcatcactgcgaattattaaaacagctgataacctgcctgaaaataaagagtcgctgttctacattaatgttcgtgccattccagcaaagaaaaaatcagatgatgttaatgctaacgagttgacgctggtatttaaaacacggatcaaaatgttttatcgccccgcacacctgaagggacgggtaaacgatgcgtggacatcactggaatttaaacgtagtgaccattcactcaatatatataacccaactgaatattacgtcgtatttgccggactggcagtcgataaaaccgatctcacaagcaaaattgaatatatcgcgcccggagaacataaacagttaccacttcctgcatctggcggaaagaacgtgaaatgggctgcaatcaatgattatggcggcagttccgggacagaaactcgtccactgcaataacaaatataaaaaacacaggtcatcagggaatgccacaacgacaccaccagggacataaacgcacaccgaaacagttggcgctcatcatcaaacgttgtttgccgatggtgctcactggcagcggcatgctttgcactaccgctaacgccgaagagtattatttcgaccccattatgctggaaactacaaaaagtggtatgcaaacaaccgatctgtcacgtttttcaaaaaaatacgcacaactaccaggaacttatcaggttgatatctggctgaataaaaagaaggtttcacagaaaaaaattacatttaccgccaatgcagagcaacttctgcagccacagtttacggtagaacaactacgtgagctgggtattaaggtggatgaaatcccggcgctggctgaaaaagatgacgatagcgtgatcaactcgcttgaacaaatcattcccggtacagcagctgaatttgatttcaatcatcagcgacttaatttgagcattccccaaattgcactgtaccgtgatgcaagaggttacgtctccccttctcgttgggacgatggtataccaacgctgtttaccaactactcgtttacaggttctgataaccgttaccgccagggcaatcgtagccaacgacagtacctgaatatgcaaaatggtgctaattttggcccctggcgattacgcaactattccacatggacacgcaacgatcagacatcaagctggaataccatcagtagttatttacaacgtgatatcaaggcattgaagtctcagttgcttctgggagaaagcgccaccagcggcagtattttttccagctacacctttactggcgttcaactcgcttccgacgataatatgttgccaaacagccagcgcggatttgccccaacggtacgcggtatcgcaaacagtagtgcaatcgtgactatcaggcaaaatggttatgtgatctatcaaagcaacgtgccagcgggtgcctttgaaattaacgatctctacccctcttccaacagcggcgatttagaagtcacgattgaagaaagtgacggtacgcaacgtcgctttatccagccttattcttcattacccatgatgcagcgacctgggcatctaaaatatagcgcgaccgctggacgctatcgcgctgatgcaaacagtgatagcaaagaacccgaatttgctgaagccacggcaatatatggtttgaataatacttttacgctgtatggtggcctgctcggttctgaagattattatgcgctggggatcggtatcggcggcacacttggcgcactgggcgcgttgtcgatggatatcaacagagctgacacccaattcgataaccagcactcttttcatggctatcaatggcgtacgcagtacatcaaagatatcccggaaaccaacaccaatatcgctgtcagctactatcgctataccaacgatggctattttagttttgatgaagccaatacccgtaattggaactataacagtcgccaaaaaagtgaaattcaattcaacatcagccagacaatatttgatggggtaagtctgtatgcctccggttcgcagcaagactattggggcaataacgataaaaacaggaatatctcagttggggtttccggtcagcaatggggaattggttacagcctgaattatcaatacagtcgctacacggatcaaaataatgaccgcgcactctctttgaatctcagtattccgttagaacgctggttaccgcgtagccgggtttcctatcagatgaccagccagaaagatcgcccaacccaacatgaaatgcgtcttaatggctcactgctggatgatggtcgcctgagctatagcctggaacaaagtctggatgacgataacaaccataacagtagcctgaacgccagttaccgttcaccttatggcaccttcagtgccggatacagctacggtaatgacagcagccaatacaattacggcgttaccggcggcgtggttatccatactcatggcgtgacgctctcgcaatatctgggcaacgcttttgcgcttatcgatgctaatggggcttctggcgtgaggatacaaaactatccggggattgctactgatccctttggctatgcagtggttccttatctcacgacttaccaggaaaaccgtctctcggtagatactacgcagctgcccgataacgtcgatcttgagcaaacaacacagtttgtggtgcccaacagaggtgcaatggtagcggcgcgtttcaacgccaatatcggttatcgcgtacttgttacagtcagcgatcgcaacggtaaaccgttgccctttggcgctcttgccagcaacgatgagacggggcaacaaagtatcgtcgatgagggcggcatactatatctctctgggatatcgagtaaatcacaaagctggactgtacgctggggaaatcaggcagatcaacaatgtcagtttgcttttagtacaccggattcagaaccaacaacctctgtattacaaggcacggcgcagtgccattaaggataaaaaaatgaaaagagcgcctcttataacaggacttttgttgatatccacatcctgcgcttatgcctcctcaggagggtgtggagctgacagcactagcggtgcgacaaattacagcagtgtggttgatgatgttacggtgaaccagacagataacgtgacaggacgggagtttactagactggccccctgaatctccagacaaccagtatcacttaaataagtgatagtcttaatactagtttttagactagtcattggagtacagatgattgatgtcttagggccggagaaacgcagacggcgtaccactagactggccccctgaatctccagacaaccagtatcacttaaataagtgatagtcttaatactagtttttagactagtcattggagtacagatgattgatgtcttagggccggagaaacgcagacggcgtaccacacaggaaaagatcgcaattgttcagcagagctttgaaccggggatgacggtctccctcgttgcccggcaacatggtgtagcagccagccagttatttctctggcgtaagcaataccaggaaggaagtcttactgctgtcgccgccggagaacaggttgttcctgcctctgaacttgctgccgccatgaagcagattaaagaactccagcgcctgctcggcaagaaaacgatggaaaatgaactcctcaaagaagccgttgaatatggacgggcaaaaaagtggatagcgcacgcgcccttattgcccggggatggggagtaagcttagtcagccgttgtctccgggtgtcgcgtgcgcagttgcacgtcattctcagacgaaccgatgactggatggatggccgccgcagtcgtcacactgatgatacggatgtgcttctccgtatacaccatgttatcggagagctgcccacgtatggttatcgtcgggtatgggcgttgcttcgcagacaggcagaacttgatggtatgcctgcgatcaatgccaaacgtgtttaccggatcatgcgccagaatgcgctgttgcttgagcgaaaacctgctgtaccgccatcgaaacgggcacatacaggcagagtggccgtgaaagaaagcaatcagcgatggtgctctgacgggttcgagttctgctgtgataacggagagagactgcgtgtcacgttcgcgctggactgctgtgatcgtgaggcactgcactgggcggtgactaccggcggcttcaacagtgaaacagtacaggacgtcatgctgggagcggtggaacgccgcttcggcaacgatcttccgtcgtctccagtggagtggctgacggataatggttcatgctaccgggctaatgaaacacgccagttcgcccggatgttgggacttgaaccgaagaacacggcggtgcggagtccggagagtaacggaatagcagagagcttcgtgaaaacgataaagcgtgactacatcagtatcatgcccaaaccagacgggttaacggcagcaaagaaccttgcagaggcgttcgagcattataacgaatggcatccgcatagtgcgctgggttatcgctcgccacgggaatatctgcggcagcgggcttgtaatgggttaagtgataacagatgtctggaaatataggggcaaatccatttacctctgcaacgctaagtagcactaactggcaatacgcctgttcctgctctgcgggtaaggcagttaaacttgtctatatggtcagccccgtacttaccaccactggacatcagacaggatattacaaactcaatgacagcctggatattaaaaccacattacaggcaaacgacattccaggactcacaaccgaccaggttgtctctgttaacacccgattcacacagataaaaagcagcaccgtatattctgctgcaacccaaacgggtgtttgccagggtgacacgtctcgttatggacccgttaatattggtgcaaataccacctttaccctgtatgtcaccaagccatttctcggctcgatgaccattccgaaaacggatattgccgtcattaaaggcgcgtgggtcgatggaatgggaagcccgtctacaggtgacttccatgatttagtcaagttatcgattcagggaaatctcaccgccccacagtcgtgcaaaattaatcagggcgatgttattaaggttaattttggattcatcaatggtcagaagtttaccacccgcaatgccatgccagacggttttactccagtagactttgatatcacttatgactgtggtgatacttcaaagattaaaaactcgttgcaaatgcgcatcgacggtacaactggggtagtagaccagtacaacctggtcgccaggcgaagaagttcagacaatgtgcccgatgtcggtattcgtattgaaaatctcggcggcggagttgcaaatattccttttcagaacggtatccttcccgttgatccttccgggcatggcaccgtcaatatgcgcgcctggccagttaatctggtcggtggtgagctggaaacaggaaaatttcagggcaccgccaccattaccgtcatggtgcggtaaaagaagacgttgcgttttgattaacgcaacgcttcggcactgttacccctgctgctccagcgcatacttatacagcgcatttttcttcacgccatgaatttctgcggccagcgccgccgcttttttcagcggcagttctgcctgtagcagcgccagcgtgcgcagggcatcggcgggtaagtcttcttcctgtgctttatgaccttcgacaatcagcaccatttcgcctttgcgacggttttcatcttcctttacccacgccagcagctcgccaacgggcgcgccgtgaatggtttcccaggttttggtcagctcacgcgccagaaccacgtagcgggattcgcctaataccgcaacgatatcttccaggctatctaacagacggtgggtagattcataaaaaatcagcgtgcgcggctccgcttcaatggcttttagcgcatcacggcggccttttgatttggcaggtaaaaagccttcgtaacagaaacggtcagagggtaaacccgcggcgcttaacgcagtgatagcagcacacggtccgggtagcggcaccacacgaatccccgcttcacggcaggtacgcaccagatggtagccaggatcgttaattagcggcgttccggcatcggaaaccagcgcaatgttttgcccctcttgcagcttcgccagcagcgtttcggctttttgttgttcgttatggtcgtgcagcgcaaacaaccgggcattaatcccaaaatgttgcagcaataaaccggtgtgacgagtatcctcggcggcaatcagatcaacggcctgtaatacctctaacgcacgctgggtgatatccgccagattgccgattggcgtcggtacaatgtaaagctggccctgagaattatccgccgattggtgttgtttcattgtgtcgtccgtattgccgatttaatattgagcattgcgtaaaaaaatatcactggatacattatggtaccctcaacattttctcgtttgaaagccgcgcgttgtctgcctgttgttctggcagccctgattttcgccggttgtggcacccatactcccgatcagtccactgcttatatgcagggcacggcgcaggctgattctgccttttatcttcagcagatgcagcaaagctctgatgataccaggatcaactggcaattactcgccattcgtgcactggtgaaagaaggtaaaaccgggcaggcggttgagttgtttaaccaactaccgcaagaactgaacgattctcagcgtcgcgagaaaacactgctggcggtagagattaaactggcgcagaaagattttgctggcgcgcaaaacttgctggcgaaaatcacacctgccgatttagaacaaaaccagcaagcgcgttactggcaggcaaaaatcgatgccagccaggggcgtccttccattgatttactgcgcgcgttaattgctcaggaaccgctgctcggcgcgaaagaaaaaaagcagaatattgatgccacctggcaggcgctctcctccatgactcaggaacaggcgaatacgctggtgatcaacgccgacgaaaatattctgcaaggctggctggatctgcagcgcgtctggtttgataaccgtaacgatcccgacatgatgaaagccgggatcgccgactggcaaaaacgttatccgaacaatccgggcgcgaaaatgctgccaacgcagttggttaacgtaaaagcgtttaaaccagcctcgaccaacaaaatcgccctgctgttgccgctgaatggccaggcagcggtatttggtcgcaccattcagcaaggctttgaagcggcgaaaaatatcggcactcagccagtggcggctcaggtagctgccgcacctgccgcagacgtagctgaacaacctcagccgcaaaccgtggatggcgttgccagcccggcacaagcctcggttagcgatctgaccggtgatcagcctgcggcccagccggtgcctgtaagcgccccggcgacaagcaccgcagcggtaagcgcacccgcaaatccatccgcagagctgaaaatctacgatacctcatcacaaccacttagccagatcttaagccaggttcagcaggatggcgcgagtattgtggttggtccgttgctgaaaaataacgttgaagagttgctgaagagcaacaccccgctgaacgtgctggcactgaaccagccagagaatatcgaaaaccgcgtcaatatttgttacttcgcgctttcacctgaagacgaagcgcgcgatgcagcgcgtcatattcgtgaccagggtaaacaagcgccgctggtgctgatcccacgcagttcattgggcgatcgcgtagccaatgcgtttgcgcaagagtggcagaaactgggcggcggcaccgttctgcaacaaaaatttggttccaccagcgaattacgcgcgggtgttaacggcggttctggtatcgctttaacgggtaccccgattactcccagagcgacaaccgactccggcatgacgaccaacaatccaacgctgcaaaccacgccaaccgatgaccagttcaccaataatggcggtcgtgtcgatgcggtgtacattgtggcaacgccgggtgaaatcgcttttatcaaaccgatgatcgccatgcgtaacggtagccagagcggtgcaatgctgtacgccagctcccgcagcgcacaaggcaccgcaggcccggatttccgtctggagatggaaggtttgcagtacagcgaaatcccgatgctggcgggcggtaatctgccgttaatgcagcaggcactcagcgcggtgaataacgattattcactggctcgcatgtatgcgatgggcgtcgatgcctggtcgctggcaaatcatttctcacaaatgcgccaggttcagggttttgaaatcaacggtaataccggaagcctgacggcaaacccggattgcgtgattaacaggaagttatcatggctacagtaccaacaaggtcaggtagtccccgtcagttaaccaccaaacagaccggcgatgcgtgggaagcacaagcgcgtcgctggctggaaggcaaaggactgcggtttatcgccgctaacgtgaacgagcgtggcggcgagatcgatctgataatgcgtgaaggccggaccaccgtttttgtcgaggtacgctatcgccgctctgcgctttatggcggcgcggcagccagtgtgacccgcagcaaacaacacaaattattacagactgcccgcttgtggctcgcgcgtcataatgggagttttgatactgtggattgccggttcgatgtggtagccttcaccgggaatgaggttgagtggattaaggatgcctttaatgaccactcataattaaggtttaaggattagcgtgcaagaaagaattaaagcttgcttcactgaaagcattcaaactcaaattgcggcggcagaggcgcttccggatgccatctcccgtgcagccatgacgctggttcagtctctgctcaatggcaacaaaatcctctgttgtggtaatggaacttccgctgccaatgcacagcattttgctgccagcatgatcaaccgtttcgaaacggagcggcccagcttacctgccattgcactaaatactgataatgttgtcttaacggcgattgccaacgatcgcttacatgatgaagtgtatgcaaaacaggtgcgggcgctgggtcatgcgggagatgtattgttagccatttccacccgtggcaacagccgcgatattgttaaagcagttgaagccgccgttacgcgtgatatgaccattgtggcattgaccggctatgacggcggcgagcttgcaggtttgttagggccacaggatgtggagatccgcattccttcgcatcgtagtgctcgcattcaggaaatgcatatgctgacggtaaattgcctgtgcgatctgatcgataacacgcttttccctcaccaggatgattaaggagaatacatgaaggcattatcgccaatcgcagtccttatttccgcgctgctgttgcaaggttgtgttgccgctgccgtagtgggtaccgctgctgtgggtaccaaagccgcaactgacccacgcagtgtcggcacccaggtggacgatggtaccctggaagtgcgcgtgaacagcgcattgtcgaaagacgaacagattaagaaagaaacccgtattaatgtcacggcgtatcagggcaaagtgctgctggttgggcagtcaccaaacgctgaactttcggctcgcgccaaacagattgctatgggcgtagacggtgccaacgaagtgtataacgagattcgtcagggccagccgattggtctgggcgaagcatctaacgatacgtggatcaccaccaaagtgcgttcgcagctcttaaccagcgacctggtgaaatcgtccaacgtgaaagtgaccaccgaaaacggtgaagtgttcctgatggggctggtgactgaacgtgaagcgaaagcggcggcagatattgccagccgggtgagcggcgtaaagcgggtaaccacagcgtttacgtttattaaatagcagccccttgtaatgcctgatgcgacgcttgccgcgtcttatcaggcctacaacgatgcaaaccgtaggtcggataaggcgtttacgccgcatccgacatgttttccctcaaatcagaataacagcgccagcccgccgacaatcacgcctgacactgccaccatcgcccccgtcagccataaggctttcgccgggaacgctttgcgcagcataatcagtgacggcaaactcactgccgggagcgtcatcaacaatgccagcgccggagcggttcccatacctgccagcatcatcgtttgtacaatcggaatttctgctgccgtgggaatgacaaacaagcatcctgctaccgccatcgccaccacccacatcaggctgttatcgacagcaccatcggcatgggggaataaccagacgcgtgcggcacccaacaccagtactgcaaggatgtaaaccgggatcgtactccagaaaagtgtccatagcgccctgccccagcggctaaaaaaaccgctctgtgcttccggtatgtcaatttcgaccggtgcctgcgtttgcggtgtttcacgcacccatttttgcaccagcgtcgcaatcagcaacaccatcaccagcccggccaccagacgaatcgccgcaaaaccccagccgaggacaaaccccataaacaccagcgtcgccgggtttaacaccggattgcccatccagaatgccagcgcaccgcccatcgatacctgttggcgacgcattcccgccgcgaccggagccgcacagcaggtacacatcatgcccggcagcgaaaacagcgttcccagcagcgtgccgcgaaagcgcgattgtccaagcgtacgcaacaaccagtcacgcgggatcagcacctgaatcaacgaaccgaggatcacccccagcaccgccgctttccataccgcgaggaaatagatcatcgcgtaatccaacgccgcctgccacggattagcatccgcctgcgcaaggatagatttaccgatactgtgggtttcggcagcagtaaacgctttgccgtagtaaggttgccatttcacataccagagaccggcaatgacaacgagaaagaaaagcgcgggtttccaccactgaatgggcgttgccgcctgagatgaagactgaccagtcatagcattccccaggaataagttatgataattgagcgcgtgaatattacgctcactatcaattcttgggaataattattcagctcttttgcgtaattctgaagagcttaaaatagtcacgccttcatgctcaggccgcatcgcctctgccagcatgacccgcgccacgtctctcgcatcaatggatttccagttaccgggcagtaaacgaaacagcggcgcaaaaagcgtttcgttcatccgctgtttgctacgatcgcccagcaacatcgacgggcgagcaatggtcaatttcggccagttctgggcaattaatgcttcttccatctcccctttgacgcggttatagaaaaacggcgagtgggcattggcacccatagcactgaccaccagcatatgctgcgcgcccagtcgccgcccggttaatgcggtatccactaccagcgtgtaatcggcatgaataaacgcctctttgctccccgcttctcgccgcgtggtgccgagacaacaaaacacaatgtcgatgggttcggtgacctgcgccaacgcgtcactcagttgcggatcatggggattaaacaccccgggcatatcgcccaacggacgtcgcgtcggcgcggctatggcgttaactttcggttcgttaatcaacatccgcagcaggtgaccgcccaccagccccgttgcgcctgtaatcagtacctgactcatcttcgctcctttacagaattgtctgccttgcgctccacggctcatgcaccaggcttaatagaccatgaggtaattatccccgattgtgtgaaattcgcctcatccaatgcaacaacgcggaggaagcatgagtaagaaaattgccgttttaatcagtgatgaatttgaggattcagaatttacttcacccgcagacgagttccgtaaagccggacacgaagtgattaccattgaaaaacaagcgggtaaaacggtgaaaggcaaaaaaggagaagccagcgtgaccatcgataaatccatcgatgaagtgacgccagcggagtttgatgccctgctgctaccgggtggtcattcaccggattatctgcgtggcgacaaccgttttgtcacctttacccgtgattttgtgaatagcggcaaacctgttttcgccatctgtcacggtccgcagctgctgatcagcgccgatgtgattcgggggcgcaaactgaccgcagttaaaccgatcattattgatgttaaaaatgcgggcgcggaattttacgatcaggaagtcgtggttgataaagatcagctggttaccagccggacaccggacgatctgccagcgtttaaccgcgaggcgttacgcctgctcggtgcctgagtcgcgtagccaaatcatttttttaccaaagcccagcgtgttgtcagtgaatttgatttcatcgagccggatttcccacaccggggccgacagcattctggcaaccggaaagcgacgattgtacgcctggcgcgcgaggtcgctttcctcaccttccagcctgcggatctcacctttaaactgcacgccgcgaattaacgctaccgttttcggctgaccgtttaccgttccggcaaccgcagcctgcggcccactcatctgcgcgtggcgcgttttttcttccgtcaaaatgtagaaggcgactttctgcgcatcaaacagataaaaagcattagcgcaccacagttccccttcctgctgcacacaccaggtgacaacatgttgttttgccaaccaacggctgatggtgatgagtgtttccattgctgctctcttttatactgtgggcctgaccttaacatgcgacgcagacgatgacaccctggtttctttacttgatccgtaccgccgacaataagctttataccgggatcaccacggatgtcgaacgccgctatcagcagcaccaaagcggcaaaggggcgaaagcactgcgcgggaaaggagaactgacgctggcgttttctgcgccagtgggcgatcgttcgctggcgttacgggcggaatatcgcgttaagcaactgaccaaacggcaaaaagagcgtctggtagcggaaggcgcagggtttgcagagctgttaagcagtctgcaaaccccggagattaaaagcgattgaaatgctcgtgatactcaaccagaccggttacgccattcagcgcgtcatccgctaaacgatgtacctggaaggcgctttcagtgcccggccagcggcaacgcagatcgtgatgcgccgccagttcaaagccgaaacgactgtacagcgccggatcgcccagcgtcaccactgcggcatagccgaactcattaagcgaatcgagtccttcatagaccagttggcgtgccagcccctgtccacggtatttttcatcaaccgccaacggtgccatgccgacccattgcaggtcttcgccctgcacatcaaccggactaaatgccacatagccaatgacctgaccttcgtcatctgtcgccaccagccccagcgtcagaaagccatcttcacgcagatcgtgaaccagcttcgcttccgcatcactttcgaatgagcgacgcagcagggcatcaatacccggcgcatcaatgggaatttctactcgaattagcatggttcacctaccgatgtctgtttggtttcaggcgcggttttcattcccgcctcaacaaaatccgccagttgcagcagcatcatgcgtaaggctttcggcatttgctccagttcaatggcgtccatcaggtttttcacatacagccccagctccgtatcgccttcaatcaccagccgacgctggaagaagagcgtatccggatcttgtttacgcgccgcaatcatcagcagatcgctggcgtcggcactaaaactcacatcagcttgcgcgttctggctgaccaccagtttgccattcaccaccgaggtaaaccattgcaggtcaatatcacgcacatgaatacttaaccagcggccttcaagaaactccagctcaccatcatccagcgcctgacggaattgccagcttaagacctgctcaagaacctggcgttttagcgcaaatggcgtcagttttaccggtacactcaacagagatggccccaaatgcacaatacgggaacgcagtttatccaacacgagttttactccctgtttcaacaatcatcctattttgccatatcagaaaaataacatagcggtataaatcaacaattccatatgaaattgctgctaccaccaatacaactttaactgccttaaatcaaaaattgtcgcagcaaggttaactaaaatcccagttcgttaacatttttgcgttttgaaagcgcaaccttcaggaaaaattatggagctgctctgccctgccggaaatctcccggcgcttaaggcggccatcgaaaacggcgcagatgctgtttatatcgggctaaaagatgatactaatgcccgtcacttcgccggccttaactttaccgagaaaaaattgcaggaagcggtgagttttgtccatcaacatcgccgcaaacttcacatcgcgattaacacttttgcgcatccggacggttacgcccgttggcagcgcgccgtggatatggcggcgcagctgggtgccgacgcgctgatcctcgccgacctcgccatgctggagtacgccgccgagcgttacccgcatattgagcgtcatgtgtcagtgcaggcttcggcgaccaatgaagaggcaattaacttttatcatcgccattttgatgttgcccgcgtggtgctgccgcgcgtgttgtcgattcatcaggtgaaacagctggcacgggtcacacctgtcccgctggaagtctttgcttttggcagcctgtgcattatgtcggaaggtcgttgctatctgtcgtcgtatctgacgggtgagtcgcccaacaccgtgggcgcgtgttctccggcccgtttcgtgcgctggcaacaaacgccgcaggggctggaatcccgcctgaacgaagtgctgatcgaccgttatcaggatggcgaaaacgcaggttatccgacgctgtgtaaagggcgttatctggtggacggcgagcgctatcacgcgctggaagaaccaaccagtctcaataccctggaactgctgccggagttaatggcggcgaatattgcttcggtgaaaattgaaggccgccagcgtagcccggcgtatgtcagccaggtggcgaaagtctggcgtcaggctatcgaccgttgtaaggccgatccgcaaaacttcgtaccgcaaagcgcgtggatggagacgctcgggtcgatgtccgaaggcacgcagaccacccttggcgcgtatcaccgtaaatggcagtgagaagagcaatgaaatattccttagggccagtgctgtggtactggccaaaagaggcgctggaagaattttatcagcaggccgccaccagcagcgccgacgtgatttatcttggtgaagcggtatgcagcaagcgccgggcaaccaaagttggcgactggctggagatggcaaaatcgctcgccggaagcgggaagcagatagtgctctccacgctggcgctggtgcaggcatcctctgaactgggcgaactgaaacgctatgttgagaacggtgagtttctgattgaagccagcgatctcggcgtggtgaatatgtgcgctgaacgcaaactgccgttcgtcgccgggcacgcgctgaactgctacaacgcggtgacgctgaaaatattgctcaaacagggcatgatgcgctggtgtatgccggtggagctttcccgcgactggctggtgaatctgcttaatcagtgcgatgagttggggattcgcaaccagtttgaagtggaagtcctgagctacggtcatctaccgctggcctactccgcccgctgctttaccgcgcgttcggaagaccgcccgaaagatgagtgtgaaacctgctgcattaagtatccgaacgggcgcaacgtgctgtcgcaggaaaaccaacaagtgtttgtactcaatggcattcagaccatgagcggctacgtttacaacctcggtaacgagctgacatccatgcagggattggttgatgtggtccgcctgtcaccgcagggtactgacactttcgcgatgctcgacgccttccgcgctaatgaaaatggcgctgcgccactgccgttgacggcaaacagcgactgtaacggctactggcggcggctggctgggctggagctgcaagcctaagtaaatatgctcgtcatacttcaagttgcatgtgctgcatctgcattcgttcaccccagtcacttacttatgtaagctcctggggattcactctcttgtcgccttcctgcaactcgaattatttagagcacagctcactttgttaacaactttaactactctttaatgcagtattaaagattaatcggtaacaaagtgagctgttatgactgataaaaccattgcgttttcgctactcgatctggcccccattcccgaaggttcttcagcgcgagaagcattctcccactctctcgatctcgcccgtctggctgaaaagcgcggctatcatcgctactggctggcagaacaccacaatatgactggcattgccagtgctgccacgtcggtattgattggctatctggcggcgaataccaccacgctgcatctggggtctggcggcgtgatgttgcctaaccactcaccgttggtcattgccgaacagttcggcacgctcaatacactctatccggggcgaatcgatttggggctgggtcgtgcgccaggtagtgaccaacggacaatgatggcgctgcgtcgccatatgagcggcgatattgataatttcccccgcgatgtcgcggagctggtggactggtttgacgcccgcgatcccaatccgcatgtgcgcccggtaccaggctatggcgagaaaatccccgtgtggttgttaggctccagcctttacagcgcgcaactggcggcgcagcttggtctgccgttcgcgtttgcctcacacttcgcgccggatatgttgttccaggcgctgcatctttatcgcagcaacttcaaaccgtcggcacgactggaaaaaccatacgcgatggtgtgcatcaatattatcgccgccgacagcaaccgcgacgctgaatttctatttacctcaatgcagcaagcctttgtgaagctgcgccgtggcgaaaccggacaactgccgccgccgattcaaaatatggatcagttctggtcaccgtctgagcagtatggcgtgcagcaggcgctgagtatgtcgttggtgggtgataaagcgaaagtgcgtcacggcttgcagtcgatcctgcgcgaaaccgacgccgatgaaattatggttaacgggcagattttcgaccaccaggcgcgcctgcattcgtttgaactggcgatggatgtgaaggaagagttgttgggatagtgtgtcttaacgcgggaagccttatccgagctggcaacgctgtcctacgtagacctgataagcgaagcgcatcaggcattgtgtaggcagcagaaatgtcggataaggcaccgctgattactgatacaccggcagcaaattaaagctcgataagatatggaccagtgcgttgccaacgccaaacaccagaatcagcgtaatcatcggcttgccgccccagacacggaatttcgggctgccaaagcgtttacgcgatgcgcgggctaacagcgccggaacaattgccgcccagatggtagctgctaaaccagcataaccaatggcgtacaggaatccgttcgggaacagtagaccacccacaacaggcggggcaaaggtcagcaatgccgttttcaagcgccccagggctgagtcatcgaaaccaaacagatctgccagatagtcaaacaaacccagcgttacgccaaggaacgaactcgctaccgcaaagtttgagaacacgaccagcagaaggtccaggctacggctgttcagcacgccgcttaatgcctgtaccagcacatcaatattaccgcccttctctgcaataccgataaactccggacgcgggatgttacccatcgtcgccagcaaccagatggtatacagcgccagtgccatcagcgtaccgtacaccaggcatttcacgatggttttcggatctttgccgtaatacttcatcaggctcggcacgttaccgtgataaccaaacgatgccagacagaacggcagggtcatcagcaaatacggcgcataagatgcattgctttcggcgacgttgaacaatgtcgcaggctgcacatgccccagtaggctaccgaaggtgaggaagaaggtaatgactttcgcccccagtacaatcgccgtcatgcggctgacggccttagtactcaaccacaccacaaacgctaccagcagtgcaaaaccaaaacccgccgcccgtgccgggacgtttagcgacatctctgcgaaggtgtgatgcagaattgaaccactggcagaaatataggcataggtcaggatatagagcacaaaggcaatggaaataccgttgaccacgttccagcctttgcccagcaaatctttggtgatggtgtcaaaactcgaaccgattcggtaattcaggttagcttccagaatcatcaagccggaatgcagcatacagaaccaggtaaagatcagcgccgccattgaccagaaaaaccacgccccggacatgaccactggcagagaaaacatccctgcgccaataatggtgccgccgataatcaccacgccgccaagcagcgacggtgacgtttgggtggtggttagtgttgccatgagagcttctctccagtgaaaaatagtgcgactgcgttgttatgcattgcactgtaccagtacacgagtacaaaagacagaaaaaaagccccgatggtaaaaatcggggctgtatatattattttacagattgtgttcgctgttcagcgatgattacgcatcaccaccgaaacgacgacgaccggtagagtcatcacgacgcggagcgcggccttcacgacgttcgccgctaaaacgacgaccatcaccacggccaccttcacggcgttcaccgctgaagttacgaccgccttcacgacgttcgccaccgaaaccacgaccaccgccacgacgctcaccgccagtatgcggctgtgcatcgcccagtaactgcatgttcatcggcttgttgagaatgcgagtgcgcgtaaagtgttgcagcacttcacccggcatacctttcggcagttcgatggtggagtgagaagcaaacagcttgatgttaccaatgtaacggctactgatgtcgccttcgttagcaatcgcaccaacgatatgacgaacttcaacaccatcatcgcggcccacttcaatgcggtacagctgcatatcgccaacatcacgacgttcacgacgcggacgatcttcacggtcaccacgcgggccacggtcgttacgatcgcgcggaccacggtcatcacggtcacggaattcacgtttcggacgcatcggcgcatctggcggtacgatcagagtacgttcaccctgtgccattttcagcagtgccgcagccagagtttcgagatccagctcttcaccttctgcagtcggctgaattttgctcagcagtgcgcggtattgatccagatcgctgctttccagctgctgctgtactttagcggcgaatttttccagacggcgtttgcccagcagttctgcgttcggcagttctacttccggaatagtcagcttcatagtacgttcaatgttgcgcagcagacgacgctcgcggttctcaacgaacagcagcgcgcggccagcacgacccgcacgaccggtacgaccgatacggtgaacgtaagactcagaatccatcgggatatcgtagttaactaccaggctgatacgctcaacgtccaggccacgggctgcaacgtcggtcgcaatcaggatgtccagacgaccatctttcaggcgttccagtgtctgttcacgcagcgcctggttcatgtcaccgttcagcgcggcgctgttgtagccgttacgctcaagagcttcagccacttccagagtcgcgtttttggtacgaacgaagataatcgccgcatcaaaatcttccgcttccaggaaacgtaccagtgcttcgtttttgcgcataccccagacagtccagtagctctggctgatgtcaggacgggtagtcacgctggactgaatgcgcacttcctgcggctctttcataaagcggcgggtaatgcgacgaatcgcttccggcatggttgcagagaacagagcggtctgatgaccttccgggatctgcgccataatggtttcaacgtcttcgatgaagcccatgcgcagcatttcgtcagcttcatccagaaccagaccgctcagtttagagaggtccagagtgccacgtttcaggtggtccagcagacggcccggagtaccgacaacgatctgcggcccctgacgcagggcgcgtaattgcacgtcataacgctggccgccgtacagagcaaccacatttacgccgcgcatgtgtttagagaaatccgtcattgcttcagcaacctgtaccgccagttcgcgggtcggtgccagcaccagaatctgtggtgctttcagctcaggatcaagattctgcaacagaggtaaagagaatgctgcagtttttccgctccccgtctgggccatacccagaacgtcgcggccattcagcagatgtggaatacactctgcctgaattggagatggtttttcgtaacccagatcgttaagggcttcaaggataggagccttcaggcccagatctgcaaaagtggtttcgaattcagccatgtagtacgtgtgcctcaaaattaatggcggccagtctacataactcatcatgaaattgatcagcaattttcattgaaaagtgtgaaccggctcaaagtaggtgtattaacgaacaacaacgccctcacccgttaaggtgatggcaatcaaaaaagattacgggctgatgtgtacgtcagctattgctggtccgattctgccaggtcatcttggtcctggcccaggagcgataattccaacaatgcgtatcggtgctcaacaaagttatgaacgttgttggcaaccgccagtttgaacagtgccgtggcgctgtccaaatcccccagacttaggtagtacttacctaaatagaagttggtttcactgagatgctcagcgagcgaggtgttatccgttgcgtccgccttgagcctttccattaacgtttgttcgctaatgttgcccaggtagaactcgacaatgttccatccccactgttccttatccgatttttcgaagtgctgtttcaacacttctttagcctgcttctcatcgagcttctgctcggcgagataaagccacagactacggaaaggatcattgggatcgtcttgataaaacgccagcagatcatcttgcgctaacttgtcacgaccgccgtaatataatgcgatcccgcgattcaagtgcgcgtagttgtaagttggatcaagctcaagtacagaatcaaacgcttcataggcagcatcaaaattgcctgcctgcgttaaatatatgcctaagtaattgaatacttcaggcatatccggtcggattgccagcgcttgcgaaaaatcgttacgcgctaatgccctcagaccgagactatcatacaacactccgcgctcatataaaagctgtgcgcgttcgtcatcggttaaagcccgactggcaaggatttgttccatacgtgccagaatcacttcctgctgtaaagtcggttgcaatggtaccgcgaggacttcacttttacgccaggaagtattactgcatcctgcaagcgtaagtgctgtcgcaacgaaacaccagcgcaaaaaaggcttcatttcccactcccgaagaccacggttgaatgaacgtcctgttcccggttgctaacaaggcgtcctgcccggttaaaagccccccgccgcagcggagggcaaatggcaaccttactcgccctgttcagcagccggagcttccggtgctgcagcaggttgagactgctcagtcgcttctttaatgctcagacggatacggccctggcgatcaacttctagaactttcaccggtacttcctgacccatctgcaggtaatcggtcactttctcaacgcgtttgtcagcgatttgagagatgtggaccagaccttctttaccgccgccgatggcaacaaatgcgccaaagtcaacgatacgggtcactttaccagtgtagacgcggcccacttcgatttctgcagtgatctcttcgatacgacgaatagcatgtttcgctttctcgccgtcggtcgctgcgatcttcacagtaccgtcatcttcgatttcgatggtagtgccagtttcttcggtcagggcacggataacagagccgcctttaccgataacgtctttgatcttatccgggttgatcttgatggtatggatacgcggtgcgaactcagagatatcgccacgcggcgcgttgatcgcctgttccattacgcccaggatatgcagacgcgcacctttagcctggttcagcgcaacctgcatgatctctttggtgataccttcaattttgatatccatctgcagtgcagagataccgtcgcgggaacctgcaactttgaagtccatatcgcccaggtgatcttcgtcgcccaaaatgtcagacagtacaacgtagttgtcgccttctttcaccagacccattgcgatacccgcaacggcagctttgattggcacacctgcgtccatcagcgccagagacgcgccgcacacggaagccatagaagaagaaccgttggattcggtgatttcagacactacacgtacggtgtacgggaatttgtccatatccggcatgactgccagcacgccgcgcttcgccagacgaccgtgaccaatttcacgacgcttcggagaaccgaccatgccggtttcgcctacggagtacggagggaagttgtagtggaacaggaaggtatcggtacgttcgcccatcagttcatcaagaacctgcgcgtcacgagcggtacccagcgttgcagtaaccagtgcctgcgtttcaccgcgggtgaacagcgcagaaccgtgagtacgcggcagcacgccagtacgcacatccagaccacggatcatatctttttcacgaccgtcgatacgcggttcgcctgccagtacgcggctacgaacaacgtttttctcgatagcgtgcagaatttcacccagttcgttttcgtccagggtttcgtcttcagcaagcagcgtcgcgatggtttcagatttgatgacatcaacctgcgcataacgctcttgtttgtcggtgatgcggtaagcatcactcagacgagcttcagccagtgcagcaacgcgcgcgttcagcgcttcgtttaccggctccggctgccagtcccaacgcggtttaccggcttctttcactagttcattgatgttctgaataacaacctgctgttgttcatgaccgaacactactgcgcccagcatctgatcttcgctcagcagttcagcttcagattcaaccatcagtacagcggcttcagtaccggcaacaaccagatccagtttgctctctttcagctcgtcctgagtcgggttcagtacgtactggtcattgatgtaacctacgcgggcagcaccaatcgggccattgaacggaataccagacagagacagtgctgcggaagcaccaatcatcgcgacgatatccgggttaacctgcgggttaacagaaaccacggtggcgataacctgaacttcgttgacgaagccttccgggaacagcgggcgaatcgggcggtcaatcagacgcgcgatcagggtttcgccttcgcttggacgaccttcacgacggaagaagctacccgggatacgaccagcagcgtaggtacgctcctgatagttaacggtcagtgggaagaagtcctgacctggtttggcttttttctgtccaacaacggtaacgaataccgcggtgtcatccatgctaaccataacagcggcagtagcctgacgagccatcatgccggtttccagagtcacggtgtgttggccgtactggaatttacgaacgatcggattaagcaatgtaatatcctttctctttcttagacagtaccttacggcactggtgttaatacccgatcttctgcgcatcctcgcgactaatgacaaccctaacccagctctatgtgggtaaagcctctcattagccgcgcgaacctctgcaacggaagatcattcatagcaacaatacattagtttccagtgaattgctgccgtcagcttgaaaaaaggggccactcaggcccccttttctgaaactcgcaagaattagcgacgcagacccaggcgctcgatgagctgggtgtaacgtgctacgtctttacgtttcaggtagtcgagcagtttacgacgctgagaaaccatgcgcagcagaccacgacggctgtggtgatcttttttgtgctctgcaaagtggccctgcaggtggttgatctgtgcagtcagcagtgctacctgaacttcggtagaaccggtgtcgtttgcgtcacgaccaaactcagaaacgattttagctgttgcttcagtacttagagacattttaaaactccaaagtatatagaatgaaaggacgccgatctctaattcagcgatcccagtgtacgttacgcaaagtgttaaacaatttacgcgacgttaagcggcagtattctactcgtagcgacctgttatcgcaagacggttaacattacgccgggtattcaaccaccaggcgacgaggcgcgacgcggccttcatcgtcaatttcgcccataccgataaacttgccgttctcaccttctgtaacgcgaaccagtccttccagcggcgcaccggatgtacgaactgggttaccatttttgaagtaaacagaagacgttaacggaagattcaccaccgggtagtccgaagctggactgtccattggcatcagtaatggatcaagtaactccgcagccggaatatcctgctgttcggcttgttcgaccagttcacgcagatgttccagggtcaccatccgttcaaccggatatttacttaccgccagacgacgcaggtaaataacatgcgcgccacaaccgagtttttcacccaggtcatcaatgatggtgcggatataagtgccttttgagcagtgaatttccagctccagctcattgccttcgtggcgaataaacagcaattcataaacggtaatcgggcgcgcttcacgcggtacttcaatgccctgacgcgcatattcgtacagttttttaccctgatatttcagtgctgaatacatcgaagggatctgttcgatatcgccacggaaagtatccagcgccgccgccagttgctctgcgctaaaggttaccggacgttcttcaacgatttgtccgtcggcatcagaagtatcggtacgctgtccaagacgcgcaatgacccgatagcgtttgtcggagtccagcagatactgggaaaacttcgtcgcttccccgaggcaaattggcaacatgcctgttgccagcgggtccagcgcaccggtatgcccggcacggttggcgttataaatccgtttcactttttgcagcgcatcattgctggacataccctgcggtttatccagcaacaaaacgccgttaatgtcgcgaccgcgacgacgaggacgactcattagtcctccttgctgtcgtccgggttaacacgacgttcttcgtcatgtttgaccacgctggtcaccaggtttgacatgcgcatcccttcaaccagagagttgtcgtagaagaaggtcagttccggcacgatacgcaggcgcatcgctttccccagcaggctgcggatgaaaccagaagcttcttgcaacgctttgatgcccgctttaaccgcgtcttcatctttgtcgttgaggaacgtcacatatactttggcatacgccaggtcgcgagacatttcgacaccggaaacggtggtcatcatgcccaggcgaggatctttaatttcacgctgcaggatgagagcgatctctttttgcatttcctgcgctacgcgctgcgggcgaccaaattctttcgccataataaattctcctgacaaaaaaggggctgttagcccctttttaaaattaatttcaggtggaagggctgttcacgttggcctgataagacgcgccagcgtcacatcaggcaatccatgccggatgcggcgtaaacgccttatcccgcatggaaccctaaaaaccttaagcgatggtacgttggatctcgatgatttcgaatacttcgatcacatcgccagtgcggacgtcgttgtagttcttaacgccgataccacattccataccgttacggacttcgttaacgtcatctttgaagcggcgcagggactccagctcgccttcgtagataaccacgttgtcacgcagaacgcggatcgggttgtgacgtttaaccacaccttcggtaaccatacagcctgcgatggcaccaaatttcggcgatttgaacacgtcacgaacttccgccagaccgataatctgctgtttcagttccggagacagcataccgctcatcgccgctttcacttcgtcaatcaggttatagatgacggagtagtaacgcagatccaagctttccgcttcaatcactttacgtgcagaggcatcagcacgtacgttgaagccaaccaggatggcgttggacgccgcagccagggtggcgtcggtttcggtgataccacctacgccagaaccgatgatcttcactttaacttcgtcagtagacagtttcagcaaggagtcggagatcgcttccacagaaccctgtacgtctgccttcaggacgatgttcacttcgtgaacttcgccttcggtcatgttggcgaacatgttctcgagtttagatttctgctgacgcgccagtttaacttcgcggaatttaccctgacgatacagtgcaacttcacgcgctttcttctcgtcacgtacaacggtaacttcatcacccgcagccggtacgccggacaggccgaggatttccaccggaatggacggacccgcttccagcacttcctgacccagttcgttacgcatcgcacgaacacgaccgtattcgaagccacacagaacgatatcgcccttgtgcagagtaccttcacgtaccagaacggtagcaaccggaccacgacctttatcgaggaaggattcgataaccgcaccgctcgccatacctttacgtaccgctttcagctccagaacttccgcctgcagcaggatagcgtccagcagttcatcgatgccggtacccgctttcgcagatacgtgtacgaactggctttcaccgccccactcttccggcaggatgccatactgggagagttcgttcttaacacgatccggatcggcttctggtttatcaatcttgttcactgcaaccaccaccggtacctgcgccgctttcgcgtgctggattgcttcgatggtctgcggcatcacgccgtcgtcggcagcaacaaccaggactacgatgtccgttgcctgcgcaccacgtgcacgcattgaagtaaacgcggcgtgccccggggtgtccaggaaggtgatcatgccgttttcagtttcaacgtggtatgcaccaatgtgctgggtaatgccgcccgcttcgccagaggcaactttcgttgaacgaatgtagtccagcagagaggttttaccgtggtcaacgtgacccatgatggtcacaaccggcgcgcgcggttcagccgcagcacccgtgtcacggtcgctcattaccgcctcttccagctcgttttcacgacgcaggataactttgtggcccatctcttcagcaaccagctgtgcggtttcctgatcgataacctggttgatggttgccattgcgcccagtttcatcatcgctttgatgacctgagagcctttaaccgccatcttgttcgccagttcgccaacggtgatggtttcgccgatcacaacgtcacggttaacggcctgagctggcttctggaagccttgctgcagggaagaacctttacgttttccgcctttaccgccacgtactgctgcgcgtgcttcttcacgatcagcttttgattcagcgtgtttgttgcctttcttcggacgcgctgctttcgcgttacgaccacggccacgaccgccttcgacttcacgatcgctttcgtcttctgcctggcgagcatgttgagaagtagtgacgtgataatcgctggaatcttcagtcggttccgcgttatcagtccatttgttttcttccgccatacgacgtgcttcttcagcaacgcgacgtgcttcttcttcgagtttacgatgcgcttcttcttcggctttacgcttgagctctgcagcttcctgctcacggcgggctttttcagcctgggcgtttttagtcatatcgtcttgttgattgctcactttgtctttttccgcagcttcacgtttcgcttgttcagcagcttcacgcttagcttgttctgcagcctcacgttcagctttttgttgcgcctcgcgtttagccgattcttctgcctcacgacgggcttgctcttccgcttcacgctgcgcttgctcttccgctgcaaggcgttcagcctcttgcggatcgcgtttcacaaaggtgcgtttcttgcggacttcgatttgtaccgatttgctttttccaccggtaccaggaatgttaagggtgctgcgtgttttacgttgcagcgtcaatttgtccgggcctgaatttttctgattcaggtggtcaatcaaagtctgtttctcttgtgcagacacagagtcgtcagcagacttccggatacctgcatcagcaaattgctgtaccaggcgttccacggaggtctgtcgctctgcggccagcgttttaatcgttacatctgtcatgctgttccttcctgctacagtttattacgcttcgtcaccgaaccagcaaatattacgggcagccataatcagtgctccggccttttcgtcggtcaacccttcgatatcagccagatcatcaatgccctgttcggcgagatcttccagcgtacaaacgccacgggcggccagtttgaatgccaaatcacgatctaccccttcaaggttcagcagatcgtcagccggtttgttatcaccgaggctttcttcctgggcctgtgcaatggtggccagtgcatttttagcacgctcgcgcagtgcttcaacggtcggctcatcaaggccttcgatttccaacagctctttcatcggcacataggccagttcttccagcgtcgagaagccttcttctaccagaacagtcgcgaagtcttcgtcgatgtcgagatatttggtgaaggtgtcgatcgctgcgtgcgcttccgcctgatgcttagcctgcaggtcgtcaacggtcatcacgttgagttcccaaccgctcagctgcgaagccagacgcacgttctgaccgttacggccaatcgcctgcgccaggttaccggcttcaacggcgatatccatggtgtgtttatcttcatccaccacgatagaagcaacgtctgccggtgccattgcgttaatcacgaactgcgccgggttatcatcccacaggacgatatcgatacgctcgccacccagttcagtagacaccgcctgaacacgcgcgccacgcatacctacgcaagcacctaccggatcgatacgtttatcgttggttttcaccgcgattttcgcacgagaacccggatcgcgagccgctgctttaatttcaatcacttcttcgccgatttctggcacttcaatacggaacagttcgatcagcatttccggcttggaacgagtgacgaacagttgcgcgccacgcgcttccgggcgaacggaataaagcacgccacgaacgcggtcgccagggcggaagttttcacgcggcagcatatcttcacgcaggatcacggcttcagcgttgttgcccagatccagagagatgttgtcgcggtttacttttttcaccacgccggtgatgatttcaccttcgtgttcacggaactgatcaaccaccatcgcacgttcggcttcacgcactttctgcacgataacctgttttgccgtctgggtagtgatacggtcaaaggtaacagactcaatctgatcttcaacgtaatcgcccaggttcaggctttcatcttcataacgtgcggcttcaagggtgatttccttggtcggctgggtgacttcatcaacaactaaccagcgacggaaggtgtcaaaatcaccgcttttgcgatcgatctgtacgcggacgtcgatctcttgttcatattttttctttgttgctgtcgccagcgcgctttccaatgcttcgaaaatcttctcgcgaggtagcgccttttcattggatacggcttcaactacagccaaaatttctttgttcatcgcgggcttttcacctcatccagactattaaaagtggggaaccaggttcgccttctggatattactcagcgcgaacacttcatctttaccttcgacggtaactgtgatcatttcaccgtctaccgctttgataacgccctgccatttacgacggttttgtaccgccatacggagaaccagagtcacctcttctccgacaaaacgggcgtagtgttcagccgtgaacagtgggcgatcgagacccggtgaggagacttccaggttataagcaacggtgatgggatcttcaacatccagcacagcacttacctggtggctcacatcagcacaatcatcaacattgatgccatcttcactatcaatatagatgcgcagtgtggatgtgcgaccgcgaataaattcgatgccaaccagttcaaaacccagggcctcaactggcgcagtaatcatctctgttaatttttgctctaatgtggacaagcccacccccaagacataaaaaaagggcctaaagcccagttattctgtagtcagataacaaaaaaccccgataaatcggggctttatataactgaaccctataaccgcaactgcggtctggagcactttccagaaggattttttcaaatcccactacgaaggccgaagtcttcacagtatatttgaaaaaggactctaagggaaagtggttgcgggggccggatttgaaccgacgaccttcgggttatgagcccgacgagctaccaggctgctccaccccgcgcctgaaacgtggcaaattctactcgttttgggtaaaaaatgcaaatactgctgggatttggtgtaccgagacgggacgtaaaatctgcaggcattatagtgatccacgccacattttgtcaacgtttattgctaatcatgtgaatgaatatccagttcactttcatttgttgaatacttttgccttctcctgctcccccttaagtgtcagcgccagtgatataagacggtaattcgccatttggattgtccgctccacccaacatgttgtttccttaaggttctcacaccagaaaggacatcaacatgctgagcagagaggacttttacatgataaagcaaatgcgccagcagggcgcgtacatcgtcgatattgcgactcagattggttgctctgaacggacggtcagacgctacctcaaataccctgaaccgccagccagaaagacccgccacaaaatggttaagctgaaaccgtttatggattacatcgacatgcgcctggcagagaatgtctggaatagcgaggttatcttcgcggagattaaggcaatgggttatacgggcggacgttccatgctgcgttactacatccagcccaaacgtaaaatgcgtccgtcaaaaagaacagttcgcttcgaaactcagcctggataccagctccagcatgactggggcgaagttgaggtggaggttgccgggcaacggtgcaaagttaactttgcggttaatacgctggggttctcccgcagcttccatgtcttcgccgcaccaaaacaggatgctgagcatacctacgaatcactggttcgcgccttccgctacttcggtggttgtgtgaaaacggtgctggttgataaccagaaggctgcggtgctgaagaataacaacgggaaagtcgtgttcaactccggattcctgttgctggctgaccactataacttcctgccacgggcatgccgtccacgcagggccagaacaaaaggtaaggttgagcggatggtgaaatacctcaaggagaacttcttcgtccggtaccgcaggttcgacagcttcactcatgtcaatcaacaactggagcaatggatagccgatgtggctgacaaacgggagcttcgccagttcaaagaaacgccggaacagcgcttcgcgctggagcaggaacatctgcagccgttaccggatacagacttcgataccagttacttcgatatccgccatgtgtcctgggacagctatatcgaggttggtggtaatcgttacagcgttcccgaagcgctgtgtggtcagccggtatcgatacgaatatcgctggatgacgagttgcggatctacagtaatgagaaactggtggcctcacatcgcctctgttcagcatcgtctggctggcagacagtgccggagcatcacgccccgctctggcagcaggtcagtcaggtggaacatcgaccactgagtgcctatgaggagctgttgtgatgcatgaactggaagtcctgctgagtcgcctgaaaatggagcatctgagttatcacgttgaaagcctgctggaacaggcagctaaaaaagagctgaactaccgggagttcctgtgcatggcgctacagcaggaatggaacggcaggcatcagcgcggtatggagtccaggctgaagcaggctcgtctgccgtgggtcaaaacgctggagcagttcgactttaccttccagccgggcatcgaccgtaaggttgtccgggaactggctggtctggcgttcgtggagcgcagcgaaaacgtgatcctgctgggccctcctggtgtcggaaaaactcatctggccatagctcttggcgtgaaagcggtggatgcgggacatcgggtactgtttatgccactggacagactgatcgcgacactgatgaaagcgaaacaggaaaaccggctggagcgtcagctacagcaactgagttatgcccgggtgttgatcctggatgaaataggctatctgccgatgaacagagaggaagccagtctgttcttccggctactgaaccgtcgatatgaaaaagcgagcatcatactgacgtcaaacaaagggttcgcagactggggagaaatgttcggagatcacgtactggcaacagcgatcctggatcggctgctacatcactcaaccacgctgaatatcaaaggagagagttaccggttaaaagagaaacgtaaagctggagtgctgaccaaaaacacaacgccaatcagtgatgatgaaatggtggaaagcggacagcatcagtaacgaaagtatttagcgggcatgaaaatggcaaataacggtcaaacatcgtggcgttgacataagcgcattattttacaaaaaacacactaaactcttcctgtctccgataaaagatgattaaatgaaaactcatttattttgcataaaaattcagtgagagcggaaatccaggctcatcatcagttaattaagcagggtgttattttatgacgacgattctcaagcatctcccggtaggtcaacgtattggtatcgctttttccggcggtctggacaccagtgccgcactgctgtggatgcgacaaaagggagcggttccttatgcatatactgcaaacctgggccagccagacgaagaggattatgatgcgatccctcgtcgtgccatggaatacggcgcggagaacgcacgtctgatcgactgccgcaaacaactggtggccgaaggtattgccgctattcagtgtggcgcatttcataacaccaccggcggcctgacctatttcaacacgacgccgctgggccgcgccgtgactggtaccatgctggttgctgcgatgaaagaagatggcgtgaatatctggggtgacggtagcacctataaaggaaacgatatcgaacgtttctatcgttatggtctgctgaccaatgctgaactgcagatttacaaaccgtggcttgatactgactttattgatgaactgggcggccgtcatgagatgtctgaatttatgattgcctgcggtttcgactacaaaatgtctgtcgaaaaagcctactccacagactccaacatgcttggtgcaacgcacgaagcgaaggatctggaatacctcaactccagcgtcaaaatcgtcaacccaattatgggcgtgaaattctgggatgagagcgtgaagatcccggcagaagaagtcacagtacgctttgagcaaggtcatccggtagcgctgaacggtaaaacctttagcgacgacgtagaaatgatgctggaagctaaccgcatcggcggtcgtcacggcctgggcatgagcgaccagattgaaaaccgtatcatcgaagcgaaaagccgtggtatttacgaagctccggggatggcactgctacatatcgcttatgaacgtctgttgaccggtattcacaacgaagacaccattgagcagtatcatgcacatggtcgtcagttgggccgtctgctgtaccaggggcgttggtttgattcccaggcgctgatgctgcgtgactctctgcaacgctgggttgccagccagatcactggtgaagttaccctggagctgcgccgtgggaacgattattcaatcctgaataccgtctcagagaacctgacctacaagccagagcgtctgacgatggaaaaaggcgactcggtgttctcgccagatgatcgtattggtcaattgaccatgcgtaacctggatatcactgatacccgagagaaactttttggttatgccaaaactggcctgctctcctcctctgccacttcaggcgtgccgcaggtggagaatctggaaaacaaaggccagtaattcgacatcaaccctgcccttcaggggtggggttaccttgcttatcctctgtaaactcctttctgagcatcacataatcgaaaacatcatggtttgcatccacaacccgtgagtctcctttatagtgtgcaatcacttcctccagcgttttcggttgttccggctttgttacccccatccacgcattaataaggtaattattgtaagctgtcgaaaagatgttgttttccgttgtacgatccacgccatccccaagaacggggctataccagataaacatcgggacatgatatgcctgctggctagcctccctgcctccatgaaaatagacgttcttcttcgtagggtcacgttccaggccgtggtcggcaaaatacatgaccgaggcgcggcgatcttttaataattcaaaaacctgacctagcaaactatctgtgtaatgaatggagttgtcatagcaggcatcctgatcgtcctgcggttgaaacacggcgctggattgcggataggcgctacaagccggttcatggcttccatttaaatgaagaacaatcagtttcttttgctgcgtattttgctgtaatgcttgcgataaatgcggcaacaacaattcatcaaatcctctgacataaactgtttccatggcgcgcatggcgatactggtaactgctgtaccattctgccgaaaagcggattgcgagcttagccagaaagtctgaaatcctgcttgattagccatattaataatgttgtcggggtaattatgaatgtcatgactcaaaacagaatcagcagttaaagaaaggggaaccgacagcgcagtgtaaggtgcgccgcttattgattgattaaacagtttgatctgttttctttgtgcttcaacttgcggtgtcgtagagcgtgtatatccatacaaagacatattgtcgacacgtacagactcccccacaatcaacacgtaggtatcaatacctgtatccctgactgataattgaaaatacggcaccgtgtttgcaattgagagtaatctttgatgctctttcgctgctaaagcaaaataattgagattgaaaaacggcgtataggtagcaaatcgcgacgctagtatatatggactgaatgcttttttattttttgcatctttataagcaaattgacaagcagaaaataaactgcccgaaatgacaatcagcaataatattcctgtcactttttttgtcggcaaggaaacatcatattttattattactgccaaaaaaagaagggataaaaaagcaaaagcacatagataagggatatacatccccagcattttgacaacttcatccggatcactctgcagcacactaatcgcaaatccatcattgaaagttgtaccaaaggtacaccatgaatagaggctaatactcatgtctgccgcagtcagtaacacaaatggtgcggcaacaagcaggcgaagcggaagggatgatatacgttttacaaccaggatggtcaggacgaagaacagcaatcgctgaaccatatgcgcgccggaagaggcgactaagttcgtaataccaaaaacaataacacaaagatacaacaaccaatgagatttaaaacttctagcaaatttgttgaatactgtcatccagaaatccaagttcacaaccaatataaacaattatcaacaatgttcaattttatatcagacatgtttttcaactctgatccatatcagaccgaaacactgttagttttttctttttaaatgatgcggccattgcgttctcagtaattaaataacattatcaatgcgtctctaaacattacgcagaacgtagccatcagtagttatactgacaggagcaggatggtttatcgagaagtaaacatatccgtattcgtaccggaactggagttgacacaataaagtgccaattatgtcagcagaagggaaaagtttataactaaggcgtaccggcaccatcgtttcaaggtaccagctacgagtaaagcaactggacgagatacagatacctgacaaccattcctcagaccaggaccaaaacgaaaaaagacgcttttcagcgtctcttttctggaatttggtaccgaggacgggacttgaacccgtaagccctattgggcactaccacctcaaggtagcgtgtctaccaattccaccacctcggcacggatactactttttagttcgggatatcgctggtcggcttagccggagcagctggctgagtttgttcggttttcgccggtgcactcagattttcccattcgctacctttattggttttgttgctattgatgttacccagcaccagactgatgatgaagaataacgttgccagcagcgccgtcatgcgggtcatgaagttaccagaaccacttgaaccaaacagcgtagcggaagcgcctgctccgaaggaggctcccatatcagcgcctttaccttgctgcagcatgatcagaccaacaaggccaattgccacaataaggaaaactaccaaaagagcttcgtacataatcaacctgttccttgcggagttgccgcgtaccaatgcttcaaccaataaagcgggagtttttaatctttcccactgaagtgggtgtgaatactaaccaaagcgaatgaccttcgcaagggcaattttatcgcattgtatcaactgcggaaaaaaacagcaaaaccgatgtgttcgctgagaaaaaaggcgacaatcgccgcctttttagccagttatttaccgttttaaacggcttttactgcatcggcgatacggtgtgcaaattcagttacctgcgcttcgtcttcaccttctaccatcacgcgaattaacggttcggtgccggatttacgcaacagcacacgtccacggctacccagcgccgcttcaacttcggcggtcacagctttaactgactcatgctcaagcggatcgccgctacctgcggtgtaacgcacgttaaccagaatctgcgggaacattttcatgccgctgcaaaggtcgtgcaggctcatatggttacgtgccatcgccgccagcacctgcaagccagcaacgatgccgtcaccggtagtggttttatccagcaggatcacatgaccggaattctctgcaccgatacgccagcctttctcctgcattttttccagtacgtagcggtcacccactttcgcgcgcgcaaatggaattcctaactgtttcaacgccagctcaagccccatgttactcatcaatgtacccacagcaccaccacgcagctggccctgacgaagaccttcacgcgcgatgatatacatgatctgatcaccatcgactttattgccttcatggtcaaccataatcacgcgatcgccgtcgccgtcgaaggcaataccgagatccgctttttcagccagcacacgagcctggagcgcgcgaacgtcggtagcccccacttcggcattgatgtttacaccgttcggctcacaaccgatagcgataacgttcgcccccagttcacgcagcacgttcggcgcgatgtgataagtcgcaccgtttgcgcaatccaccacaatcttcagttcgctgaggctaagttcgttcgggaacgtggctttgcaaaactcgatatagcgacccgcagcatcaacgatacggctggctttacccagttctgccgaatcaacacagctgatctctttttccatttccgcttcgatggcctcttctaccgcatccggtagtttggtgccgtcgatagagaaaaatttaatgccattatcgtagaacgggttatgcgatgcagatatcacaattccggcctctgcgcggaaggtacgcgtcagataagccacggccggtgttggcatcgggccagtgaagagtgcggaaaggcccgctgccgccagacccgcttccagtgctgactccagcatatagccagaaatacgcgtgtctttaccaataatgatcttacgggagccgtggcgcgccagcactttacccgcggcccaacccagcttaagcacaaaatcaggtgtgatcggcgcatcccctacacgaccacgaatcccatcggtaccgaaatatttacgattactcatagcgtttgttttcctttgcagacagagtggcttccaccacccgcatcgcttctacggtttctttgacgtcatgaacacgaataatgtgcgcgccttgcattgcggcaatgaccgcacaggccagactaccgctcaggcgctcggacggccccacgttcagcagctgcccaatcatcgattttcgtgacatacctaccaacagcggcaggttgaaatggtgaaattcagccaggcgcgccagtaatgaatagttatgggagagatttttaccgaaaccgaatccggggtcgagcaacaatttctcttttgcgatacccgcctgctcgcaacgtgctatttgctcaataaagtagcgattcacttctgcaaagacatcgtcatacttcggagcttcctgcatggtttttggatttccctgcatatgcatcagacaaaccggtaaaccggtttctgcagccgcctccagagcgccaggttcggaaagggagcggatatcgttaataatgtgagcgccaactttcgctgactcacggatgacttctggtttggatgtatctaccgagatccagacttcgaagcgttgagcaattgcctcaaccacaggaataacacgttgcaactcttcttcaacgctaacttccgccgcccctgggcgcgtggactcgccaccaacgtcaatgatcgtcgcgccagcgttgatcatcagattcgcatgtttcaccgcatctatcagcgagttatgcgtgccaccatccgaaaaggaatcaggcgtgacgttgaggatccccattacgtgaggatggctaaggtccagtgaagtgccctgggcaaagagtttcatggtgttatccctggtatgaattgataagaaaaaaccccggagcacgccccggggttttcggtacaaatacagtcatctgatgcgggaacttacttgtcgcctaactgctctgacatggtgttacccgggttcggcgtacgcggttcatcaaccggacgaggagcctttggactaccattgtcgccagaattgttagaagcgcctggttcttcccagcccgctggcggacgtacatcgcgacgtgccatcaggtcatcaatctgcggtgcgtcgatagtctcatatttcatgagagcatctttcatcgcatgcagaatatccatattgtcggtcagaagctgacgcgcacgattatagttacgctcaatcagtgctttcacttcctggtcgatgatacgtgcagtttcatcggacatatgtttcgctttcgctacgctacggccgaggaacacttcaccttcttcttccgcgtacagcagtggacccaatttctcagagaagccccactgagtcaccatgttacgcgccaggttggtcgcaactttaatatcgttggacgcaccggtagaaacatgttccggcccgtagatgatctcttctgccagacgaccaccgtacagcgtagaaatctggctttccagtttctgacggctggcgctgattgcgtcgccctcaggcaagaagaaagtcacacccagcgcacgaccgcgtgggataatcgtcactttgtgcaccggatcgtgttccggcaccaggcgaccgataatcgcatgacccgcttcgtggtaagccgtcgattctttctgcgcttccgtcatcaccatggagcgacgttccgcacccatcatgattttatctttcgctttctcgaactcaaccatcgacacaacgcgtttgttgccacgagcagcgaacagtgccgcttcgtttaccaggttcgccaggtcagcaccggagaaaccaggagtaccacgggcaatgattgccgcgtcgatatcgggtgccaatggtacgcgacgcatgtgaactttcaggatctgctcacgaccgcgaacatctggcaagccaaccacaacctgacggtcgaaacggccaggacgcagcagggccgggtcaagaacgtccggacggttagtcgcggcgataacgatgataccttcgttaccttcgaagccatccatctcaaccagcatctggttcagagtctgttcacgttcatcgtgaccaccgcccagaccagcgccacgctggcggcctacggcgtcgatttcatcgataaagatgatgcacggtgccgctttcttcgcctgttcgaacatgtcacgaacacgggatgcacccacaccgacgaacatttctacgaagtcagaaccggagatagtaaagaacggaactttcgcttcgcctgcaatcgctttcgccagcagcgttttaccggtacccggaggaccgaccatcaggacgcctttcgggatcttaccgccgagtttctggaagcggctcggctcgcgcagatattcaaccagttcagcaacttcttcttttgcttcgtcgcagcccgcaacgtcagcaaaggtcgttttgatctgatcttccgtcagcatgcgcgctttgctcttaccaaacgacatggcacctttgccaccgccgccctgcatttgacgcatgaagaagatccacacaccaatcagcaacagcatcgggaaccaggagatgaagatagaagccagcaggcttggttcttcaggcggttcaccgacaaccttgacgttcttggtcaacaggttatccagtaatttcggatcctgaaccggaatgtaagtggtataacggttactatctttcttggtaacgttgatttcacgtccgttgatacgcgcttcacgaacctggtcgttattgacctcttgtaggaaggtagagtaatccaccttacggccattagactcgctgggcccaaagctctggaatactgacatcagcacaacggcaatgaccagccagagtattaggtttttcgccatgtcactcaagggattaacctcttattacaactgtgttaaaaacagcgtcaggatactctatatccagcatctttcaaactttcgtctgaaatctcccggttagggtttacgcccggtcgctacaatatacacttcccgcgaacgtgcacgagaagagtccggcttacgaactttgaccttcgtaaacagggagcgaatttcccttagatactcatcgaaaccttcgccctggaacaccttcactacaaaactgccacctggcgctaatacatcacgacacatttctagcgccagttccaccagatacatggcacgggggatatccaccgccggtgttccgctcatgtttggtgccatatcggacatgacaacctggactttgctgtcgccaacgcgctccagcagtgctttcatcaccagttcatcacgaaaatcgccctgaagaaagtccacaccaacgataggatccataggtaaaagatcgcaagcgatgatgcggcctttgccgccaatttgggtgaccacatattgtgaccaaccacccggagcagcaccaaggtcgacaaccgtcattcccggtttaaagagtttgtcactttgctgtatttcatcaagtttaaaccaggcacgggaacgtaacccctttttctgtgcctgttgaacatatttatcgctaaagtgttcctgaagccagcggctggagctggcagaacgcttcttacctgtcatttaactttcccatggggataactcatcgtaaccaattgcgtaaatttttacgcgcctatttggtgatatatgggagatggcggtagaatgacccattttcaatcccaacgtaagcaaaaaatacgatgaatctgagtactaaacaaaaacagcacctgaaaggtctggcacatccgctcaagccagttgttctgcttggcagtaatggtttgaccgaaggggtgctggccgagattgaacaagcgttagagcaccatgaactcatcaaggtgaaaatcgccaccgaagatcgcgaaacaaaaaccttgatcgtggaagctatcgtgcgcgaaaccggcgcctgtaatgtacaggtcatcggtaaaacgctggtgctttatcgcccaactaaagaacgtaaaatctcgctgccacgctaagattatcctaaagttacacacatttgctgtgtaaaacgaggggttttccgcaggcaggagagcaaaatgccacgctctgttcgttgataaaaggccgcatagcggcctttttcctttctttacaatacatcaacatcttgagtattgggtaattcttacaggtattccaccttaattacttcaaattctacttcgccgcccggcgttttgatgaccacaacatcatcttcttctttgccgatcaggccacgagcaataggcgagtttacagaaatcaggttttgtttaaagtcagcttcgtcatcgccaacgatgcgataagtctgttcttcgtcagaatccagattcagcaccgttacggtagcaccaaaaataacgcgcccattgttaggcattttggtgacatcaatcacctgcgcgtttgacagcttggcttcgatgtctttgatacggccttcgcagaagccctgctgttcacgagctgcgtggtattcggcgttttctttcaggtcgccatgctcacgcgcttccgcgatagcagcaatgatttcaggacggcgcacagatttcagaaaatccagctcttcgcgtaatttttcagcgccgcgtaaggtcatcggaatagcttgcatttgttatacctcttgaatattcctgatggggcaagtcttcacccaccccggctgttcggcctgcccggcataactcctcaccgggaccagaagcaaaaaaataccgacccaggtacaagtcccaggtcagctacaattcacattttgatagtcattttaccctgaagttcccgaagggtcatcgtttactttatagggcgttgcgccgtagtatgacggctcgattccaggttgttagcgcgagattatgcgattttccagatttatcatcggattgaccagctgtatagcgttcagtgttcaggccgcaaatgttgatgagtacattactcaactccccgctggtgccaaccttgccctgatggtgcaaaaagtcggcgcgtcggcccccgctattgattaccacagtcagcagatggcgctgcctgccagtacccagaaagtgattactgcgctggcggcgttgattcaactcggccccgattttcgttttaccacgacgcttgaaaccaaaggcaatgtggaaaacggcgtacttaagggtgacttagtggcgcgatttggtgccgatccgacgttaaaacgtcaggatattcgcaatatggtcgcgactttgaaaaaatctggcgtcaaccaaatcgatggcaatgtgttgatagatacctccattttcgccagccacgataaagcccccggctggccatggaatgacatgacacaatgctttagcgctccgcctgccgccgccatagttgaccgcaactgtttctccgtctcgctctacagtgcccaaaaacccggtgatatggcctttatacgcgtggcatcttattaccccgttacgatgttcagccaggtacgcaccctcccccgtggttctgccgaagcgcaatactgcgaactggatgtcgtaccaggcgacctgaaccgctttacgctgacgggatgcctgccacaacgttctgagccgctcccgttggcttttgccgtgcaggatggagccagttatgccggtgcaattctgaaagatgagttaaaacaggcgggtatcacctggagcggaacactgctgcgccagactcaggttaacgaacctggaacggtagttgccagtaaacagtcggccccgctgcacgatctgcttaagattatgctgaaaaagtcggataacatgatcgccgatacggttttccgcatgataggccatgcgcgcttcaatgtacctggtacatggcgggccgggtcggacgctgtgcgtcagatcctgcgccagcaagccggtgtcgatattggaaacaccattattgccgatggttcagggctttcgcggcataacctgattgcccccgccaccatgatgcaggtgctgcaatacattgcccaacacgacaatgaacttaactttatctccatgctgccgctggcgggctatgacggctctttgcagtaccgtgcaggtctgcatcaggcgggcgtggatggaaaagtctcagcgaaaaccggttcgttgcagggggtatataacctggcgggattcattaccacagcgagcgggcaacgaatggcgtttgtgcaatatctttctggctatgcagtagaacctgcggatcagcgtaatcgccgtattccgttagtgcgttttgaaagccgtttgtataaagatatttatcagaacaattagtcaaaaagaaaccccggcacatggccggggcttcagattattgacaaagtgcgctttgtttatgccggatgcggcgtaaacgccttatccggcctacaaaatcgtgcaaattcaacatattgcaattctcttgtaggcctgataagcgtagcgcatcaggctgatttggcgtttatcatcagtgattaacgcttgtaaatgaactcaacgccttcttcgtcgtcttcgtcccagtcgtcatcccagtcttcatcatcctcttcagcaatctcttcaagctgctggcgatgataatcgtcccacatgaattcgactttctctggctgtttcgcttcttcagcctgcacgaccgggttttcaaggataaaggtcatcacatcccagcagagatctttcacgcccagtccgctcgccgcagagatcagataatatttatcttcccagcccagcgcttcagcaatcgctttcgctttctcttcagcttctgccttatccagcagatcgatcttattgaacactaaccaacgcggtttcgccgccagatcctggctgtatttttccagctcgctgataataatacgcgcgttttcaaccggatcggtgccgtcaatcggatcgatatcgatgaggtgcaacaggacgcggcaacgttccaggtgcttcaggaagcggatacccagacctgcgccttccgcagcgccttcaatcagtcctggaatatcggcaacaacgaagctcttttcgttgtccattcgtaccacacccagacttggcaccagagtggtaaacggataatccgccactttcggtttagccgccgataccgcgcgaataaaggtcgatttacccgcgtttggcatccccaacataccgacgtcagccagcagcatcagctccagcagcagctcacgcttatcacccggcgtaccgttggttttctgccgtggtgtacggttaacggacgatttgaaacgggtattgcccagaccgtgccagccgcccttagcaaccagcagacgctgaccgtgtttagtcatatcgcccatggtttcaccagtaccctggtcgattacacgcgtacctaccggcactttaatcgtcacgtctttaccgcgcttaccggtacaatcgcggcttgcgccgttctgaccgcgctctgcacggaaagatttttcaaaacgataatcgataagcgtgttcaggttttcgtcggcttccatccatacgtcaccaccatcaccaccgtcgccgccatccgggccgcctttcggaatatacttttcgcggcggaagctcacgcaaccattaccgccatcacctgcaacgaccagaatcgatgcttcatcaacaaacttcattttattctccataaatcattcgcctgcgcggggttgcgataccaccgttgtatgcttacgtaatccgccccaaatacgatgaccaatggcggaatacatcgcgcccgcaaccacgacaaacgcaccgagataacctaaaaggtttaacatcggtctggcgaagaaatcgggccaggccagtgataaaagatctgaaaaaaacagcgtaaacagtggggtgagcgtgatgatcgcgctcacctgcgctgcctgccagcgagccatcgcttccgccagggcgccatatcctaccaatgtattcagtccgcaaaaaattaaacatgcgagctgccagtggctaagctgcgctatcactccaggctttgccagagggaagagcgcaattgtacataaagtgtacagtaaaaacaggatctgcggtgaggccagccgacgcaataaaaccttttgcgccacgccataactcacccaaaccgtcgccgcaccgaccccaaagataactccccaggtgtaatcggtgagctttgtaaatatctcgaccagactggtgttaaaaaacatcaccaggccgctcaggagcatcaatgcccctacaacctgagtgctgcgcattttctctttcaggataaatacgctggcaaccatcatgccaactggcgagagttgcccaatcacctgcgaagcggtcggactcaggtattgcaaggatgagctgaacaggatgaagttcccaaacagcccggcggtcgccactgccaacaaaatcaaccagcgtggcttacgaaacacgcgtaatggcggcaacctcttcttcaccgcaagaatggcaccaaggccaatactcgccatcaagaaacggtaaaacacgattgtcggaggttccatcacctccagcacctgcttcattgcgattggcaacgccccccagcaaattgctgtggtgagcgccaaaagaatgccaatgcctgcctgctgcttcataccgtattccctgcaaagcgcatttgcggattaacgtcgcaccatgcgcatttttaccggttatcgaatgtaaaaagccccgcaacgtgttgcggggctttcatccgttaccgggacgcgaaaaacttattcagcttcgatgctgataaatttacggtttttcgggcctttaacttcgaatttcactttaccgtctgctttagcaaacagagtgtggtcacgaccgcaacctacgttagcgccagcgtggaatttggtaccacgttgacgaacgatgatgctacccgccagaacggattcgccaccgaaacgcttaacgcccaggcgtttagcttctgaatcgcgaccgttacgtgtggagccgccagcctttttatgtgccatttgaaatctctcctcaggtcttaggcgctgatgccagtaattttcacatcagtgaaccactgacgatggccctgctgcttacgatagtgtttacgacgacgaaacttaacgattttaactttctcgccacgaccgtgagcaacaacttcagctttgattacgccgccatcaacgaaaggaacgccgattttgacttcttcaccgtttgcgatcatcagcacttcagcgaactcaacagtttcgccagttgcgatgtccagcttttccaggcgaacggtctgaccttcgcttactcggtgttgtttaccaccactttggaaaaccgcgtacatataaaactccgcttccgcgcacaccttttcaatgattcagagtgcgctataaatattcacaatagggcgcgaatattacgcaaaacgcacgcctttgacaagtgctacagtcaatacacgaagaaaaaaaacacaacttgtacggtaacgtttatctgtgccattttttcagtacaatcaccctatattcctaaccataaaccctaagttgcctttgttcacagtaaggtaatcggggcgaaaagcccggcttttgcgatgaatttagaaaaaatcaatgagttaaccgcgcaagatatggcgggtgttaatgcggcaatccttgagcagcttaattccgacgtccaactgatcaatcagttaggctattacatcgtcagcggcggcggtaaacgtattcgtccgatgattgctgtactggctgcacgagctgttggctatgagggaaatgcgcatgtcaccattgctgccctgatcgagtttatccacacggcgactctgctacacgacgacgttgtggatgaatcagatatgcgcaggggtaaagctaccgccaacgccgcatttggcaatgccgccagcgtgctggtaggcgattttatttatacccgcgcgttccagatgatgaccagcctcggttcactcaaagtgctggaagtcatgtcagaagctgtaaacgtcatcgcagaaggtgaagttctgcaactgatgaacgttaacgatccggacatcactgaagaaaactacatgcgcgttatctatagcaaaaccgcgcgtctgtttgaggctgccgcgcagtgttccgggattctggctggctgtacgccggaggaggagaaaggcctgcaggattatgggcgctatctcggcactgctttccagttgatcgacgatttactcgattacaatgccgatggcgaacagttaggtaaaaatgtcggcgacgatctgaacgaaggtaaaccgacgctgccgctgctgcatgcgatgcatcatggcacaccagaacaggcacagatgatccgtaccgccatcgaacagggtaacggtcgccatcttctggaaccggttctggaagcaatgaacgcttgtggatctcttgaatggacgcgtcagcgtgccgaggaagaagcagacaaagccatcgcagcattacaggtgctcccggacaccccttggcgagaagcactcatcggcctcgcgcacatcgctgttcaacgcgatcgttaatcccctcccttcatcccgcgcagtgcgcgggatgattccagtaaattccataaaaacactaattcagcgctataacacctgaaaaaaagggcgatgaatctttatatattctgaatattcacactctttacaggaactttttagagcaataggccatcaggagtatagtgatgcccgacagaagaagtgttctgaatgaaagcgactaacttaaggagtgaggaaagatggaaagtaatttcattgactggcatcccgctgacatcattgcgggtttgcgcaagaagggaacgtcaatggcggcggagtctcgcagaaatggtttgagttcctcaacgctggcaaacgcattatcgcgcccatggccgaaaggagagatgattattgcgaaagccctgggaactgacccctgggttatctggccatcacgctaccatgatccgcagacccatgagtttatcgacagaacgcagttgatgcgtagctacactaaaccgaaaaaatgagtggtctggcggtagccccgcgaacggggctgccagctctcagacgattactcgcctttcacacgctcaatatttgcacctaaagcgcgcagtttgtcttcaatgcgttcgtagccacgatcgatgtgataaatacgatcaaccaccgtcgtcccttccgcaatacagccagccagcaccaggcttgctgatgcacgcagatcggttgccataacctgtgcgccagaaagtttttcaacaccgtgacaaataacggtattgctttcgatttcggcatgcgcgcccatacggctaagctccggcacatgcataaagcggttttcaaagaccgtttcggtgatgaatccggtcccttctgccaccaggttcaacagcgtgaactgggcctgcatatcggtcgggaatgccggatgcggcgcggtacgtacgttaacagccttcggacgtttgccatgcatatccaggctaatccagtcttcgccgacttcgatgtccgctccagcgtcacgcagtttcgccagcacggcgtcgagagtatctggctgcgcgttacggcagataattttgccgcgagaaatcgccgccgccaccaggaaagtaccggtttcgatacgatccggtagcacgcgatagacaccgccgcctaaacgttccacaccttcgatgacgatacgatcggtgccctgaccgctaattttcgcacccagcgtaatcaggaagttcgcggtatcgacgatttccggttcacgcgctgcgttttcaataatcgtggtaccttccgccagggttgcagcacacatgatggtcaccgttgcgccaacgctgactttatccatcacgatatgtgcgcctttcagacgaccatcgacggaagctttaacgtaaccttcttccagtttgatggtcgcgcctaattgttcgaggccagaaatgtgtagatcaaccggacgcgcaccgatcgtacaaccgccaggcagtgaaacttgcccctgaccaaagcgcgctaccagcggccccagtgcccagatagaagcacgcatggttttaaccagatcgtaaggtgcgcagaatacattaacgtcgcgggcatcaatatgcacagaaccattacgttctactttcgcacccagctggcttagcagcttcattgatgtatcgacgtctttcagttttgggacgttctggatctctaccggttcttccgccagtagagcggcaaaaaggataggcagagcagcatttttagcgccggaaattgtgacttcgccctggagcttcgttggcccctgaacacgaaatttatccatttagtttgttctcagttaacaattcatatccgctaccggcgaatcgcccatagctcaaaagccgttcagtttgcgatcgcgcgcccactccgcaggggtatacgctttgatcgacacagcatgaatgcggttatccgcaatatattccatcagcgggccatagaccgtctgctgttttttaacccgactcatgccgtcaaacaactcacccacggcaataacctgaaagtggctgccatcgccggaaacgtggacttcctggagggagagagcgttcatcaacacgctctgaatttcattattttccatgggatcttcaatcatcagttaataaaccagcgaaacatcttagagcaaagttgcgctggcataaataagcaaaaagcctcgctgataaatcagacaaggctcgacttgcaggcaggtttgccggacaggcggttaacgccatatccggcctgaaaaaatttaacgaggcagaacatcagcaggcaaattatacaatttcgcgagggtatacactttgtcgtttaccccctgaagcgtcacgttgttgccctgctttttcgccagatcgataagatggagcagcagtgccagtccacccgtatccacgcgggacacacggctaagatcgatgcaggtaatccccttcaccgcttcctcacgcatttcccaaagcggtagcagaacgtcctgatccagctctccggataacgccagcgtgtcacccgtctgcatccagctcagtgactcgctcattattttttctcttccagagtgattttctgttgagaaatcgatttcagttgcgcagtcaggccgtcgatacctttggtacgcagcagcgttccccactcgttttgtttggtggtgatcatactgacgccttcagcaatcatgtcgtaagcctgccagtttcccgtctgggagtttttacgccactggaagtccagacgcaccggcggacggccattcgggtcaataatggtaacgcgaataggcacaatggttttatcgcccagcggctgttctggcgcaatctgataggtttgaccgtgatacatcgccagcgcctgaccgtaagcctgcttcaggtactcacggaaagcggcaaagtaggcttcacgttgagcaggggtcgcactcttgtaatactggcccagcaccagcgcaccggcgtatttcacctgtacgtatggcagcagttcctgatcaacaatggtacgcagataatccgggttggcccgaatttgcggttgctcattcttcaggcgatcgaacgttttctgcgccgcctcgtccatcagcttataaggattggtctggtctgcctcggttgccgcactcagaggtgcaatcaccagcaaagcgaccatcattaaacgtttaaacatgcgtcggttctcctgaaattatttcgttgtacccacaggttcagtggtttcattattacctggcgcagcagctggcgcatcgccactattcttattgtcatcgcctttactaccgtaaaggaactgaccaatgagatcttccagcaccatcgcagacttagtgtcctgaattgtatcgccatccttcaggatagcagtccccagttccgggtcttcaaaaccgacgtttaatgccagatattgttcccccagcaggccggaagtacgaatgctcagcgaactggtatctggaatgtggttataacgttgttcaatttccagcgttacgcgcggcagataggttttcgggtccagcgtaatatccgccacccgacccacaacaacgccaccaatactgaccggagagcgcgctttcaggccgccaatgttatcgaacgtcgcataaagcgtgtaggtcggttcagtacgtatggacgtcacgttcgccgccttcaggcaaacaaacagcgccgccagcagtgctgctaataaaaagatacccacccaaatttcattttttttcgtttgcatgaactcaattcccaaacatcaatgcggtcagcacaaaatccagccccagaacagccagagacgagtggacaacggtgcgagtggttgcccggctaatcccggcagacgtcgggatggcgtcgtagccgttaaacaacgaaatccacgtcaccgtgatggcgaacaccacgctcttaatcagacagttgaccagatccatacgccagtcgacggcattttgcattgccgaccagaagaacccgctatcaatgcctttccaactgacgccgaccagagatccgccccagatccccacggcgacgaaaataaccgtcaacagtggtaatgaaataaccccagcccagaaacggggagaaataacccgacgcagcggatccaccgccatcatctccatactggagagttgctctgtagcgcgcatcaggccgatttctgcggttagcgccgaaccagcacgcccggcaaacaacaacgcggcaaccaccggccccagttcacgcagtagcgataacgccaccagcatacccagactggtttccgcactataagtggtcagaaccagataaccttgcagccccaacaccattccgatgaacacgccagaaaccacaataatcagcatcgacaggacgccgacattatagagctggcgcaccagcagcggcgcatgtttgcgaaattccggtttgccgaccagcgcattgaataacattaacccggcccgcccgaacgttctcagggttttaatccctttatgtccgagcgacgccagcgcatttaacagcatgagtggcttaactccctggtaaaagatcagcgtgataatcgccggcaggatagcggaacggaacaggcccgtcagctatcccgtccagaaactgacgtacgcgcggatcaggattcgcctgcaacgcctgggcactgccatgagcgacaatttttttgtccgccaggatccaggcgtgatccgcaatacttaacacttccggcacatcgtgagaaaccaccacacaagtcacgcccagcgcgctgttcagctcagaaatcagcttcaccagtacgcccatggtgatgggatcttgcccaacaaaaggttcatcaaacatgatgagatccggctccagcgcaatcgcacgcgccagcgctgcacgccgcgccatcccaccggaaagttcagaaggcattagtttagccgctccacgcagccccacggcctccagcttcatcatcaccgtactatgcaacaatggcgcgggtagttgggtatgttcgcgcagtggataggcgacgttgtcaaatacgttcatatcagtgaacaacgccccggactgaaataacatgctcatccgtttgcgcactgtatacaggcgcgaacgagacatcgccggaatattctcaccatcgaaaaggatctcaccatgatctggtgcgatttgcccgccaatcagacggagtagcgtcgttttaccgatgcccgatggccccatgatcgccgtgatcttccctcgcggcacggtcagggaaatattatcgaagatgcagcgattgccacgcgtaaaactgacatcgcgcatatcgactaaattcgccacagactgctccataattcacccttcgtcttgcgttgattttctaagcatggcgctcaatttaaccttgaacccaacatatttacagaatattacccgccgtggttagcgaaagctggcatttgttttactttttagccgcataaagtcaaaattaagaatccgttacggctttctgaaaatcttcagcggaccgacgagtatacctgaagaaaggacgttagatgcttttagctacggcactgttaattgttggtttacttttggtcgtttacagtgccgaccgcctggtttttgccgcgtctattctttgccgaacctttggcatcccgccgctgatcatcggcatgacggtggtcagtattggtacatcgttaccagaaatcatcgtctcgcttgccgcgtctctgcacgaacaacgcgatttagccgttggtacagccctcggctcaaacattatcaatattttgctgatcctcggtctggctgcgctggttcgtccttttaccgtccattccgatgttctgcgtcgtgaattacccttaatgttgttggtcagcgtagtggccggttccgtactctatgacggacaacttagtcgcagcgatggtatctttctcctctttctggctgtgctatggctgctgttcattgttaaacttgcacgtcaggctgaacgtcaggggactgacagcctgaccagagagcagcttgcagagctgccgcgtgacggcggattgcccgtcgcgtttttatggctcggcattgcgcttatcatcatgccagtggccacgcggatggtggttgataacgccacggtgctggcgaattactttgccatcagcgagttgacgatgggtctgacggcaattgctatcggaaccagcctgccggaactggcaaccgcaatagcgggggttcgcaaaggtgaaaacgacattgctgtcggaaatatcattggcgcaaacatttttaatattgtcatcgtgttgggtttacccgcgctgataacgccaggagagattgagccattggcgtacagtcgtgactacagcgtgatgttgctggtgagcattatttttgcgttgctgtgctggcggcgctccccgcaaccgggccgtggtgtaggggtattattaactggcggatttatcgtatggctggcgatgttgtactggttatcgccaatactcgttgaataactggaaacgcattatgtcgcacgtagagttacaaccgggttttgactttcagcaagcaggtaaagaagtcctggcgattgaacgtgaatgcctggcggagcttgatcaatacatcaatcagaatttcacgcttgcctgtgaaaagatgttctggtgtaaagggaaagttgtcgtcatggggatggggaaatcggggcacatcgggcgcaaaatggccgcaacgtttgccagcaccggtacaccttcatttttcgtccatcctggtgaagccgcgcatggtgatttaggcatggtcaccccacaggatgtggtgattgctatctctaactcaggtgaatccagcgaaatcacggccttaattccagtgcttaagcgtcttcacgtaccgttaatctgcatcaccggtcgcccggagagcagcatggcgcgcgccgcagatgtgcatctgtgtgttaaagtagcgaaagaagcctgtccgttagggctggcaccgaccagcagcaccaccgccacgctggttatgggcgatgccctcgctgtcgcgctgttaaaagcacgcggctttactgctgaagattttgcgctctcacacccaggcggcgcactgggtcgtaaacttctgctgcgcgtaaacgatattatgcatacgggcgatgagatcccgcatgttaagaaaacggccagtctgcgtgacgcgttgctggaagttacccgcaaaaatcttggtatgactgtcatttgcgatgacaatatgatgattgaaggcatctttaccgacggtgatttacgccgtgtcttcgatatgggcgtggatgttcgtcagttaagtattgccgatgtgatgacgccggggggaatacgtgtgcgccctggcattctggccgttgaggcactgaacttaatgcagtcccgccatatcacctccgtgatggttgccgatggcgaccatttactcggagtgttacatatgcatgatttactgcgtgcaggcgtagtgtaaagattcaaggataaacaacaatgagcaaagcaggtgcgtcgcttgcgacctgttacggccctgtcagcgccgacgttatagcaaaagcagagaacattcgtctgctgatcctcgatgtcgatggcgtactgtcagatggcctgatttatatgggcaataatggcgaagagctgaaagcgttcaatgttcgtgacggttatggcattcgttgtgcgctcacctctgatattgaagtcgctatcattaccgggcgaaaggctaaactggtagaagatcgttgtgccacattggggatcactcacttgtatcaggggcagtcaaacaaactgatcgcctttagcgatctgctggaaaaactggcgattgccccggaaaatgtggcttatgtcggcgatgatctcatcgactggccggtaatggaaaaagtgggtttaagcgtcgccgtggccgatgcgcatccactgttgatcccgcgcgccgattacgtgacgcgcattgctggcggtcgtggcgcagtgcgcgaagtttgcgacttattactcctggcgcagggcaaactggatgaagccaaagggcaatcgatatgagtaaagccagacgttgggttatcattgtgctatcactggcggttctggtgatgatcggcattgatatggccgaaaaagacgataccgcccaggtggtcgtcaacaacaatgatcccacctataaaagcgagcatacggacacgctcgtctataacccagaaggggcactaagctatcgattgattgctcaacacgttgaatattattccgatcaggccgtttcgtggtttacgcagccggtacttaccacgtttgataaggataaaatcccgacatggtccgtaaaagcagataaagccaagctgaccaatgaccggatgctctatttatatggacacgttgaagtcaacgcacttgtgccagactctcaacttcgcagaatcacgacggataacgcgcagatcaatctggtgacgcaggatgttacctctgaagacctcgtcacgttatacggaacaacatttaactccagcggtctgaaaatgcgcggcaacttacgcagcaagaacgccgagctgattgaaaaggttagaacatcctatgaaattcaaaacaaacaaactcagccttaatcttgtgcttgccagctcacttctggccgccagcattccggcatttgccgtaaccggagacactgatcagccgatccacattgaatcggaccagcaatctcttgatatgcaaggcaacgtggttacctttaccggtaatgtcatcgtcacccagggcaccatcaaaattaatgccgacaaagtggtcgttacccgtccgggcggcgaacaaggtaaagaagtgattgacggctacggtaaaccggcaacgttctaccagatgcaggacaacggtaaacccgttgaaggtcacgcttcccagatgcactacgaactggcaaaagattttgtcgttctgacgggtaatgcttatctgcagcaggtcgatagcaacattaagggcgataagatcacttacctggtaaaagagcagaaaatgcaggctttcagcgacaaaggcaagcgcgtaaccaccgttctggtgccgtcgcagctgcaggacaaaaacaacaaaggccagaccccggcacagaagaagggtaattaattcgttatggcaacattaactgcaaagaaccttgcaaaagcctataaaggccgtcgcgtggtagaagacgtcagcctgaccgtcaactccggggaaattgtcggtctgctggggccaaacggtgccggtaagaccaccactttctacatggttgtaggcattgtgccgcgcgatgcgggcaacatcattattgatgatgacgatatcagtctgctgcctctgcatgcacgcgcgcgccgcggtatcggctatctgccacaggaagcctccattttccgtcgcctcagcgtttacgataacctgatggcggtactgcaaattcgtgacgacttgtctgctgaacaacgtgaagaccgcgcgaacgagctgatggaagagtttcacattgagcacctgcgtgacagcatggggcagtcactctccgggggtgaacgtcgccgtgtagaaattgcccgcgcactggctgcgaatccgaaatttattctgctcgacgaaccgtttgccggggttgacccgatctcggttatcgacattaaacgcatcattgagcacctgcgcgacagcggcctgggcgtgctgatcactgaccacaacgtgcgtgaaacactggcggtttgtgaacgcgcttatatcgtcagtcaggggcatttgatcgcccacggcacgcctacagaaatcttacaagacgaacacgttaagcgtgtataccttggggaagacttcagactctgatagggtagaagtttgcgacgttttagcaggagagtacgattctgaacatgaagcaaggtttgcaactcaggcttagccaacaactggcgatgacgccacagctccaacaggcaattcgtctgttgcagttgtcgacgctggaacttcagcaggagctacagcaggcgctggagagtaatccgctgcttgagcaaatcgacactcatgaagaaatcgacacccgcgaaacgcaagacagtgaaacgctggacaccgccgacgcgctcgaacaaaaagagatgccggaagagctgccgctcgatgccagttgggacaccatttacaccgctggtacaccatccggcaccagcggtgactacattgacgatgagctgccggtctatcagggcgaaacgacgcagaccttgcaggattacctgatgtggcaggtcgagctgacaccgttttccgacactgaccgcgctattgctacctctatcgtcgatgccgttgatgacatcggttatctgactgtcccgctggaagatattctcgaaagtatgggcgatgaagagatcgacatcgacgaggttgaagccgtccttaagcggatccaacggtttgatccggtcggtgtagcggcaaaagatctgcgtgactgcctgctaatccaactctcccaattcgataaaaccacgccgtggctggaagaggccagactgatcattagcgatcatctcgatctgttagccaatcacgacttccgcactttaatgcgcgtcacgcgtctgaaagaagatgtgctgaaagaagccgtcaatctgatccagtcgctcgatccgcgccccgggcagtcgatccagactggcgaacctgagtatgtcattccagatgtgctggtgcgtaagcataacggtcactggacggtagaactcaacagtgacagcattccgcgtctgcaaatcaaccagcactacgcctcgatgtgcaataacgcgcgcaacgatggtgacagccagtttatccgcagcaatctgcaggatgccaaatggttgatcaagagtctggaaagccgtaacgatacgctactgcgcgtgagtcgctgtatcgttgaacagcagcaagccttctttgagcaaggtgaagaatatatgaaaccgatggtactggccgatatcgcccaggctgtcgaaatgcatgaatcgacgatatctcgcgtgaccacgcaaaaatacctgcatagtccacgaggcatttttgaactgaagtatttcttttccagtcacatcaataccgagggcggcggcgaagcttcctccacggcgattcgtgcgctggtgaagaaattaatcgcggcggaaaacccagcgaaaccgttgagcgacagcaagttaacctctttgctgtcggaacaaggtatcatggtggcacgccgcactgttgcgaagtaccgagagtctttatccattccgccgtcaaaccagcgtaaacagctcgtttgacccaaccgataaggaagacactatgcagctcaacattaccggaaataacgtcgagatcaccgaggcactgcgcgaatttgttacagccaaatttgccaaacttgagcaatattttgaccgaatcaaccaggtctatgttgttctgaaagtggagaaagtcacccacacctcagatgcaacactgcatgtaaacggtggtgaaattcatgccagcgcggaaggtcaggacatgtacgctgccattgatggcttaattgataagctggcacgccagttgaccaaacataaagataaactgaaacaacactaattgtccgggcaattagcatgtgcatggcggcctgttgtgcggcacaacgggccatttgtacggttaatgctccgagcctgttccactgtttgagtgggcaggttcttaggtgaaattatgacaaataatgatacaactctacagcttagcagtgttcttaacagggaatgtacgcgaagccgcgtccactgtcagagcaaaaaacgcgccctggaaatcatcagcgagctggcggcgaaacaacttagcctgccgcctcaggtggtttttgaagctatcctgacgcgggaaaaaatgggcagtaccggtatcggcaatggtattgccattccgcatggcaaactggaagaagatactctgcgcgccgttggcgttttcgttcagctcgaaacgcctatagctttcgatgccatcgacaaccaaccggtggacttactttttgccctgctggtgtcggcagaccaaactaaaacgcacctgcatactctgtcgctggtggcgaaacgtctggcggacaaaaccatctgccgccgtttacgcgcagcccagagcgatgaagagctgtatcaaatcattacggataccgaaggtactccggatgaagcgtagttattcggtaatgtctcttttagacgttgtgaggagaaacagtacatggtactgatgatcgtcagcggacgttcaggttcaggtaaatctgtcgccctgcgtgcgctggaagatatgggtttttactgcgtggataaccttcccgtagtgttgttacccgatctggctcgaaccctggccgatcgcgagatttctgccgccgtcagcattgatgttcgtaatatgccggagtcaccagaaatattcgaacaggcgatgagtaacctgcctgacgctttctcaccgcaactcctgttcctggatgccgaccgtaataccttaattcgtcgttacagtgacacgcgccgactgcatccgctttccagcaaaaacctgtcgctggaaagtgctatcgacaaagaaagcgatttgctggagcctctgcgttcgcgagcggatctgattgtcgatacctcagaaatgtccgttcacgagctggctgaaatgctgcgtacccgtctgctgggtaaacgtgaacgcgaactgaccatggtctttgagtctttcggcttcaaacacggtatccctatcgatgcagattacgtctttgacgtgcgcttcttgccgaacccgcactgggatccgaaactgcgtccaatgacaggtcttgataaacctgtcgccgcgttcctcgaccgccacacagaagtacacaattttatctaccagacgcgaagctatcttgagctatggttacctatgctggaaaccaacaaccgtagctacttgacggtcgccattggttgtaccggcgggaagcaccgttcggtgtatattgcagagcaactggcagactacttccgctcgcgcggtaaaaacgtccagtcacgccatcgtacgctggaaaaacgtaaaccatgaccgtcaagcaaactgttgaaatcacaaacaagctgggcatgcatgcccggcctgcaatgaagctgtttgaattaatgcagggttttgacgctgaagtgctgttacgtaatgacgaaggcaccgaggccgaagccaacagcgttattgcgctgctgatgttggattctgccaaaggacggcagattgaagttgaagcgaccggcccacaggaagaggaagcactggccgccgttatcgccctctttaactctggttttgatgaagattaatcttcatcactttgacatacaactcccttcaaactccccccgacaataagaaaatcacgtactgaaatcgttctcaatcaacgtcatttgtacattttgtgcgcttttcactttcagaagaaccttaagaaaaccttaagaggcattgtttaggttttgtttaagttaatcgaccatactggagatcgtcagaaaatatttccaggagatggcatgattcgcttatctgaacaaagtcccctgggcaccggaagacatcggaaatgttatgcgcatccggaagatgcccaacgctgtatcaagattgtctaccatcgtggcgatggtggcgataaagagatccgccgtgagttaaagtactacgcgcatcttggtcgccggttaaaagactggagtggaataccgcgctatcacggtaccgttgagacggattgcggaaccggttatgtctacgatgtgattgcagattttgacggcaaactctccattacgctgaccgaatttgctgaacaatgccgttacgaagaagacattgcacaactgcgccagctactgaaacagctgaagcgttatttgcaggataaccgtatcgtgacgatgtcgctgaagccgcagaatatcctctgtcaccgcatcagtgagtcagaggttatcccggtcgtctgcgacaacattggtgaaagcacattgattccactggcgacctggtcgaagtggtgttgtctgcgtaagcaagagcggttatggaaacgatttatcgcccaaccggcgctggctattgccctgcagaaagatctgcaacctcgtgagagcaaaacgctggccctcacttcgcgcgaagcttaatccagctggtgttgttgcataaacggctcaccgcctaactgatacatctgccgtaaaatccacgcctgacggctacgcacgtagcccgatggcgaggagactttgaaacgaagtggattaggtaatacagctgccagtaatgcagcttccgaccgggtaagtttgctcgcgggtttgtggaaataacgttgtgccgcagcttcgacgccaaacacaccgtcgccaaattcggcgatattcaggtaaaccgtcaggatacgctttttgctccagactgtttctatccccagcgttaatccagcttccagcccttttcgtacccagctacgcccatcccataaaaagagatttttggccgtctgctgagaaatcgttgaagcaccgcgaatacggttttcattgcgctcgttgtgcgccagggctttctcaatggaagcgacatcaaagccccagtgctcaggaaatttctgatcttctgcggcaatcaccgccagtcccatccacggcgagatttgatccatactgacccagtcagaatgtgccacgtaacgaaaattgccatgcagccaggcgctgacctgtcgctcgaccattaccgctgagaagggaacaggcgcaacactaaacaacgcgatgcccccgccccagaaaacggcgaggacaaccattaacagcaaaagaaaacggcgaacgaaactaaacaccgttaagcggcttttactcattcagccagaaccagcacgcgggaaaccagcttatcaatgccgctcgccgcttctgcaatgttctgcgccagcatatatgctggggtggtgacaatcttattgtcttcatcaaccacgatatcatcgacaggacagggcacatgctccgcgcccatctcttccagcacttctgcggtatcgatatcagtaccgatggtcaaacgcagcgggaaatcgaaaattttcggcagcatcgccggggcaatacacataaaaccaagcggttttccggcctgatgcatcgcttgtgccagcgcctttaattcacggtcaacggtgcattcgctaccaagagtggcaaaattgcttaaattcttcgccgcgccaaacccccccggcacaatcaacgcatccagttcagcggcatcggcctgggccagaggacggatttcaccgcgcgttattcgtgccgcttcaatcagcacgttgcgcgtttccgtcatcgcttcgccagttaaatggttgataacatcaacctgctgcttatccggtgcaaagcagaccgcctgcgcaccgctgcgtgaaatagctaacaacgtcaacaccgcttcatgaatttcagaaccgtcatagacgccgcatccgctcagaattacgccaattttcttcattgtgatcatcctttcgcaattgactgaaacacattaatttttttaataaaaatggtacgcatcacacatttaactgattcatgtaacaaatcatttaagttttgctatcttaactgcgtgcggcctgaaaaacagtgctgtgcccttgtaactcatcataataatttacggcgcagccaagatttccctggtgttggcgcagtattcgcgcaccccggtctagccggggtcattttttagtggcttttgccacccacgctttcagcacttctacgtcgtgacgccactcttctttcatctcttcaatccattcaccgacgttatcttcccaggcaggaaggtcaggagactgaatttgctgacccagctgttgcagatggcgtaaccccactgaccccgccgcacctttaattttatgtccttcctcaacaatgccttttttatcctgcgccgtcagattcgactccagcacgctgacatagcccggcatcatcttctcaaacaccgctaacccgtcggtgatcagcttcggtcctacaagttcgagatactgttccagcatgggaatatcgagcaatgcttctgatttactgttctcttctgtcgtcaccgtactctcctcatcatcctgggtatcccagaatttcttgatcatcgcggttagcgccggaacagaaagcggcttactcagcacatcatccattccagcattgaggtactcttgtttgtctttcagcacgttagcggttaaggccaccagcggcggtaaatcctctcgcggataacgcttcgtcagttcacgagagatatccagcccggtcatatctggcaactgaatatccagtaacaccaggtcgtattcgcccggtttaaacatctctagcgccgccttgccggtcatggcgacatcaacgctgttacctaatttttccagcacagaacgcgcaacaatcacgttcagttcaatgtcttccaccagcagcacattcagcgccggtaaaggcatatcgtcttcatcaaacgcatcatcgacctcttctgctaccgacggtgcgtggatcgtcaacgtaaaggttgaacctttgccctgttcgctggtaaccgtaatatcgccgcccatatttttcgccagacgacgagaaacggccagaccaataccggtgccggtggcaggtttaccgccatgactgtctttcacctggtaatacatggcgaaaattttatccagctcatcctgcggaatgccgataccagagtcttccacttcaaaatgcagcatatcgccttcatcgtagcgcacgcgcacggtaacctggccttgctgggtgaatttgacggcgttactgatgaggttccacaggatctgccgtaaacgcgtcccgtcggtaatgacctgatgcggtaatggcagcgtcggctccaggttaaagcgcaatcctttttgttgcgcctgcaatgcggagagattttccagatcggcaaggaagctggtgaaatcaaccggttgattatcaagctggaccttgcgccgttccatcttatccatgtcgataatatcgttaaagatattccccagcgtgacggccgaaacatggatggtcttgagatatttttcctgctcggcggtgagttcggtatccagcagaatgcggctcagaccgacgataccgttcagcggtgtacgcaattcgtgactgatggtggagataaacgtcgttttgtcgcggctggcccgttcaagcgcatcctgataccgcttacgctcggtaatgtctcgaccaaagcccatcaaaccgtgacgtttacccacgcggtcgtagtacggcactttacggatttcaaagcaggctttgcgcccgtccgggtaatccagccactgttcataggtcagtgacacattatgacggaacactttttcatcggtttcaatgacttttgcggcggcttccggtgagtaaacatcagcaggtttcaggtgaaccagttgtttttcgctttttccggtcagcagctccatcgcgcggttacagccggaaaactctttatcttcgttacgataaaaaaccaggtcgggtgaagcatcaaggaaggaacgtaagaatgaggattgctgctcgagctgaatttgtgtctcttcgcgctctttgatttcaattttcagttggccgaaggtttcctgcagttctgcttccgctttttcacgaacggcgatttcctgatttagctgggcaatattatcttttaactgaacgttgaggctcaaatcgcgctcgcgcatctcctccagtttttgcaccagccgtgacagacgttgtcgtgactcctccagttgctcgacgaccaccgatagaaagtagaccgcccacggcgtaatcaacaaaccaaagaagatagaacgaataacatcaatgctttcgacctgaccatgcagcaccatggttaccgccatttgtaccacaatggcaagaacgacgagggccagcgccagcaacattgagaagcgcaccagacctaacttcatcatcaggtcaacataatactgcgccagcagacgaatttgcttcattagggaattccttcacgacaacctgccccaataatacccaattctgacagttacgttataaattgtgtgagaaatgcggaattcccctcaacgacctactccgttggaggtagccacggacgtcccagcgccgatccctgtacgccatgttcattcagatagcgatccagctcgaccattcccgtccatcgattttcgcaccacagaggagcaagcagcgtcgggcgacgggcgctggcggaaatgcggtggtagatcacttccggtggcgtatggcgaatcatttctccggcagtgagcgtgtaatcctccagttcaataccgttcaaacgccccgcttcccaggctttcgccataatgctgcctttcacaatatgcaacggatgtagctttataccgtcaacaccggtttccactacccgctccagcgtttgcagacattcagccagcccttcgcctggcagaccgacaattaaatgcgagcacaccttcagcccgcgctggcgtgccagctgcgtcgtgcgctgataacaggcgaaatcatgaccgcgattaatgcgatgtagcgttttgtcgtgcacggtttgcagccccagctccagccacacttcgtagccctggtctttatattcgcaaagcagatccagcaccgcatccggcacgcagtccgggcgcgtgccgacacacaaaccgacaatattggcctggctcaccgcctgttgatacatcgaacgcagcacctgaacttcggcaaaggtgctggtatacgcctggaaataggcgaggtaacgtttcgcgcgattaattaaattcgcctgatgcgccagctgttcggcaatggaacgatgctgctgcgcttcgtcggcaaacgaggcaacattacagaaggtgcagccgccgcgcccgatggtgccgtcgcgattcgggcaactgaaaccgccgtgcagcgtcagcttatgcaccttttgcccataacgacgggtgagatcaccaccaaacatattgactaatttctgtaactgcataatctgatagaccgcgccttgaaaagaggccaaagcctgccatttttagctcaattcggcgatgacctggatcaatcgtcccggcccgcttttatcaactgcataatcaatcaaaattaccgaaatttcatgcataatcacataaatcacttttgcttatcttgtgtcagatttttttatctccttatggattttaggcaaaaacagtagcatgaaacgtcattaccaattaatgcagtataaaatgctggttttctcgtcaattcaaggcaggataagggttaacacgcctttatgacagtcaggaattgactgtttctctaacgacttcccttttagccttaaagataaaatctattttaatttcagccatttaataaagaattttgcgctaaagcacatttctgtaccaataagcttgccatttgacctgtatcagctttcccgataagttggaaatccgctggaagctttctggatgagcagcctgctcatcatatttatgcagtaattgagatcccctcttcaccgtattaaccgatgcgaaaaggacaacaagggggcgaatgcgaggcgcgcgtatgacacgcaacccccgtcgccacgctctttctgtacccgtgcgcagcggttcggtagtggggttcccgcagagcctgggggaggttcacgatatgttgtacgataaatcccttgagagggataactgtggtttcggcctgatcgcccacatagaaggcgaacctagccacaaggtagtgcgtactgcaatacacgcactggcccgcatgcagcaccgtggcgcgattctcgccgatggtaaaaccggtgacggttgcggcttgctgttacaaaaaccggatcgcttttttcgcatcgttgcgcaggagcgcggctggcgtttagcgaaaaactacgccgtcgggatgctattcctgaataaagatcctgaactcgccgctgccgcacgccgcatcgttgaagaagaactgcaacgcgaaaccttgtcgattgtgggctggcgtgatgtccccactaacgaaggcgtactgggtgaaatcgccctctcctctctgccccgcattgagcaaatttttgtgaacgccccggcaggctggcgtccgcgcgatatggagcgccgtctgtttatcgcccgccgccgcattgaaaagcgtctcgaagccgacaaagacttctacgtctgtagcctatcgaatctggtgaacatctataaaggtctgtgtatgccggcggatctgccgcgcttttatctggatcttgcggacctgcgtctggaatcggccatttgcctgttccaccagcgcttctccactaacaccgtaccgcgctggccgctggcgcaaccgttccgctatctggcgcataacggtgaaatcaacaccatcactggtaaccgccaatgggcgcgtgcgcgtacctataaattccagacgccgcttatccctgatctgcacgacgccgcaccgttcgtcaacgaaaccggctctgactccagttcgatggataacatgctggaactcctgctggcaggcgggatggatatcatccgcgccatgcgtctgttagtgccacccgcctggcagaacaacccggatatggacccggaactgcgtgccttctttgactttaactccatgcatatggagccgtgggatggcccggcgggcatcgtgatgtccgacggtcgttttgccgcctgtaacctcgaccgtaacggtctgcgtccggcgcgctacgtcatcaccaaagataagctcatcacctgcgcctctgaagtcggtatctgggattaccagcctgacgaagtggtcgaaaaaggccgcgtcgggccaggcgaactgatggttatcgacacccgcagtgggcatattctgcactcggcagaaaccgatgacgatctgaaaagccgccatccatataaagagtggatggagaaaaacgtccgccgactggtaccgtttgaagatctgcccgatgaagaagtgggtagccgcgaactggacgacgacacgcttgccagctaccagaaacagtttaactacagcgcggaagagctggactccgtaattcgcgtactgggcgaaaacggtcaggaagcggtcggttcgatgggcgatgataccccattcgccgtgctctccagtcagccgcgcattatttacgactacttccgccagcagtttgcccaggtgactaacccgccaatcgacccgctgcgtgaagcgcatgttatgtcgctcgccaccagtatcggtcgtgaaatgaacgtcttttgcgaagcagagggccaggcgcaccgtttaagctttaaatcgccgattctgctctactccgatttcaaacagctcacgacgatgaaagaggagcactaccgcgcagatacgctggatatcacctttgacgtcactaaaaccacgctcgaagcgacagtcaaagagctgtgcgacaaagccgaaaaaatggtacgtagcggcaccgtgctgctggtgctctccgaccggaatatcgctaaagatcgcctgccggttccagccccgatggcggttggcgcgatccagacccgtctggtcgatcaaagcctgcgttgcgatgccaacatcatcgtcgaaaccgccagcgcccgcgatccgcaccacttcgccgtgttgctgggcttcggcgcgacggctatttatccataccttgcctatgaaacgctgggccgcctggtagacacccatgcgattgccaaagattatcgtaccgtgatgctcaactaccgtaacggcatcaacaaaggcttgtacaaaatcatgtccaaaatgggcatctccaccatcgcctcttaccgctgctcgaaactgtttgaagcggtcggtctacacgatgatgtagtgggcctgtgcttccagggggcggtcagccgcattggtggggcaagctttgaagacttccagcaggatctgctgaatctgtcgaaacgtgcctggctggcgcgtaagcccatcagccagggcggcctgctgaaatacgtccacggcggcgaataccacgcctacaacccggacgtggtgcgcacgctgcaacaagcggtacaaagcggcgagtacagcgactatcaggaatacgcgaagctggttaatgagcgtccggcaaccacgctgcgcgatctgctggcaattacgccgggtgaaaacgcggtcaacattgctgatgttgaaccggcaagcgaactgtttaaacgcttcgataccgctgcgatgtctatcggcgcgttaagcccggaagcccacgaggcgctggcggaagcgatgaacagcatcggcggtaactcaaactccggtgaaggcggtgaagatccggcgcgctacggcaccaacaaagtgtcgcgcatcaagcaggtggcttccggtcgctttggggttactccggcgtatctggtcaatgccgacgtcattcagattaaagtcgcccagggcgcgaagccgggcgaaggcggtcagttgccgggtgataaagtcactccttacatcgccaaactgcgctattcggtgcccggagtgacgctgatctccccgccgccgcaccacgatatctactctatcgaggacttagcgcagctcattttcgacctcaagcaggttaacccgaaagcgatgatctccgtgaagctggtttccgaaccgggcgtaggcaccatcgcgactggcgtggcaaaagcttatgccgatttaatcaccatcgcaggctatgacggtggcaccggcgcaagcccgctgtcgtcagtgaaatacgcaggttgcccgtgggagctggggcttgttgaaacccagcaggcgctggttgccaatggtctgcgtcataagatccgtttgcaggtcgatggcggcctgaaaaccggtgttgatatcatcaaagcggcgattctcggcgcagaaagcttcggcttcggcactggcccaatggtcgcgctcggctgtaaatatctgcgtatttgccacctgaacaactgcgcaacgggtgtggcaactcaggatgacaaactgcgtaagaatcactatcacggcctgccgttcaaggtgacgaattactttgagtttatcgcccgtgaaacccgcgagctgatggcacagctgggggtaacgcggctggtggatctgattggtcgcaccgacctgctgaaagagctggacggtttcaccgccaaacagcagaaactggcgctgtcgaagctgctggagaccgccgaaccgcatccaggtaaggcactctactgcaccgaaaacaacccgccgtttgataacggcctgctgaacgcgcagttgctgcaacaggcgaaaccgtttgtcgatgaacgccagagcaaaaccttctggttcgatatccgcaataccgatcgctccgtgggcgcgtcgctttcaggctatatcgcccagacgcacggcgatcaggggctggcagccgatcctatcaaagcgtacttcaacggcaccgcaggccagagtttcggtgtatggaacgcgggcggcgtggaactgtacctgaccggggatgccaacgactatgtcggtaaaggcatggcgggcggcttaatcgccattcgtcctccggttggttccgccttccgcagccatgaagcaagtattatcggcaacacctgcctgtatggcgcgaccggtggtcgtctgtatgccgcaggccgcgcgggtgaacgtttcggcgtgcggaactccggtgctatcaccgtggtagaaggcattggcgacaacggctgtgaatatatgacgggcggtattgtctgtattctgggtaaaaccggcgttaacttcggtgcgggcatgaccggcggcttcgcttacgttctcgatgaaagcggtgatttccgcaaacgcgttaacccggaactggtcgaggtcttaagcgttgacgatctggcgatccatgaagagcatctgcgcggtcttatcaccgagcatgttcagcatactggctctcagcgcggtgaagagattctggcgaactggtcaaccttcgccactaaatttgcgctggttaaaccgaagtccagtgatgtaaaagcactgctgggtcatcgtagtcgtagcgcagcagagttgcgcgtgcaggcgcagtaaggggtagcaacaatgagtcagaatgtttatcaatttatcgacctgcagcgcgttgatccgccaaagaaaccgctgaagatccgcaaaattgagtttgttgaaatttacgagccgttttccgaaggccaggccaaagcgcaggctgaccgctgcctgtcgtgcggcaacccatactgcgagtggaaatgtccggtacacaactacatcccgaactggctgaagctcgccaacgaggggcgtatttttgaagcggcggaactgtcgcaccagaccaacaccctgccggaagtttgcggacgagtctgcccgcaagaccgtctgtgcgaaggttcctgcactctgaacgatgagtttggcgcggtgaccatcggcaacattgagcgttatatcaatgataaagcgttcgaaatgggctggcgtccggatatgtccggcgtgaagcaaaccggtaaaaaagtggcgattatcggcgcaggcccggcaggtctggcgtgtgcggatgtcctgacgcgtaacggcgtaaaagccgttgtcttcgaccgtcatccagaaattggcgggctgctgaccttcggtattccggccttcaagctggaaaaagaggtaatgacgcgtcgccgtgaaatcttcaccggcatgggtattgaattcaaactcaataccgaagtgggccgcgacgtgcagctggacgatctgctgagtgattacgatgccgtcttccttggcgtcgggacttatcagtcaatgcgcggcgggctggaaaacgaagacgccgatggcgtgtacgcagcgctgccgttccttatcgccaacaccaaacagttaatgggctttggtgaaacccgcgacgaaccgttcgtcagcatggaaggcaaacgcgtggtggtccttggcggtggcgacactgcgatggactgcgtgcgtacgtccgtgcgccagggagcgaagcacgttacctgtgcctatcgtcgtgatgaagagaacatgccgggttcccgccgcgaagtgaaaaacgcgcgggaagaaggcgtagagttcaaattcaacgtccagccactggggattgaagtgaacggtaacggcaaagtcagcggcgtaaaaatggtacgtaccgaaatgggcgaaccggatgccaaaggccgtcgccgcgcggagatcgttgcaggttccgaacatatcgttccggcagatgcagtgatcatggcgtttggtttccgtccacacaacatggaatggctggcaaaacacagcgtcgagctggattcacaaggccgcatcatcgccccggaaggcagcgacaacgccttccagaccagcaacccgaaaatctttgctggcggcgatatcgtccgtggttccgatctggtggtaaccgctattgccgaaggtcgtaaggcggcagacggtattatgaactggctggaagtttaagctctgtcccagcgccgcctcctcagaaaagagtcggcgctgaaattctcctttctttctggaaagcgcctcgcataatctgaagaaaaccaatgtaatacgctcatctggattgttaccggtagatgcccggcgtatagctgattccattattcaacgcagcgccatataaagggacagataatggaatcgctctcagagagaacctcaacaggctaccagcaaatccacgacggtattattcacctggtcgatagcgcccggacggaaacggtacgtagcgttaacgcgctgatgaccgcgacatactgggaaattggccgacgaattgtcgaatttgaacaaggtggcgaggcaagggctgcgtatggtgcgcagctaatcaagcgactatcaaaggatttaagtctaaggtataagcgtggtttctctgcaaaaaacttacgccaaatgaggcttttttacctcttttttcaacatgttgaaattcgccagacagtgtctggcgaattaacaccattgggaattccgcagacaccatctgcagaattcccatcggcaaagatttggcagacgctgtctgccaaattgagaggctgtttgatatttccacagcttttgtattgcatctcctattttcggtttgtatattcatgcaaataaacgaaggaaagttgccgtgatttacattgaacagcttgaattaatccataaaagtggtgatgtgttgtatccagtaaaaataaccagaaaatcatcaggaaaaactgccttccaccttgttccattcggcttaaataagactcacgaccttctagaggtggaagatgcttcagaagcaattcggctggtgattgatgaacgtcattccattcgctgcagtacacttacagcaactattacgaataaaaagggcaagcgaattaagcggacaggtatatacagtatcaagggtgttaacataaaagaatacaacgtcaggtaatggcacagagcggtccgtcagttcaggtttggctctgtgccaaagatgggtcaggtcacacctgatctaataaatttaagccattaaatcagccttaaccttcaccaccacctttttaatctcacccggctcgccaacaacgcatcccggcttatgcggctctcctagcataaacacggcgaacattcccggtttcaggatgatggcttgctcgttttcaatggtgctgcaaagctggtaatcatcctcatggtggaactcttcacactgacgcgcagtgcctgccatgccaaacagaatccgttcttcaccgtttaataacagctggatatcaatgtattgctcgtgcagctccgcttttttctcaacgggcgattgagtgttaaacgtcatgacattcataaaaatattgtcgccctgtaattcgtaacgacccggcgctttttcttgcggtctggcagctaatgccagcgttaacgcgtcctgtaacgcaggatgtaacccagcagacggtaatgaccgtacttcacccatcatcataatttttctccctgggccaacagcgctgccccaagtaaacctgcatcatggcggtagtgcgccgccagtaaatcaacatgaaataccgctggctcctgcgccagatacgtttccaccaacgccagatacccttctgccagaccaacgctgccaccgaccaccacgcactggcaatcagttgtggctttaatatcagcgatcagccttgccagcacatgtgcggagcggtgaatcagttgctgcgcctgctcgtcgccctgcccggcgcgtgtgaaaatagttctcgcatccgcgcccatgagttcaccttgcgctgccgctgcaataccgcgaccagaagcaatcgcttccacgcaacctgtgcgtccacagccgcagactgggccgtgtggatcggcaagcgtatgcccgatatgccccgccagaccgccagggccggtaagcagtttaccgccgctcactacaccgccgccgacgccagtggaaacggtgataaacaccatctcggttacatcgccttccagcgcctgatactctgcccatgctgcggcctgcgcgtcgttaatggcaatggtcggcaaattggtaagttgttccagcgttttgactaacggaaagtgtagcaatccaccgagattatgcggattcagcgccagcaaactgccgtcgcgaataattccggttgaagcgatggcaacccgctgcgcatgagcttgcaacggagagactaatgcggataaggcatcacgcaaggcttctggtgtctggctggctggcgtaggaagttcacgacgatcgcggatctgcccgtcagcgccaatcagcgcggcggcaagtttagtaccgccgatatcaatcgccagtgtggtcatagcaccgcctttttcatcgctgtgttgtaccactgacaaatgtgttcaagacgcgtaatggcagaaccgaccgtcaccgcccacgcgccgtggcgcatcgcatctgccgcctgagcaggcgtgttgtaacgcccttcggcaatcacccgacatccggcttcgctcaacgttttcaccagcgccagatccggctcttctggcgtttcaggcgtggtatagccagaaagcgtagtgccaataatttcggcgcccagcttttggcatgccaggccgtcttccggcgttgagcagtcggtcatcgccagtaaaccgtgatgatgtatacgtgccagcagcgtttcaacaggcaccggacgcgggcggtcggtgccgtcaatggcgataatgtccgcgcccgcctgcgccagcgcatcgacatcttcaatataggccgtgatgcgtaccggagaatcctccagatcgcgtttcacaattccaataatcggcacgctcaccaccgcacgcgtggcttgcagatttgccacaccttcgatgcgaatggcaaccgcgcccgcctgctctgccgctaatgccatggctgcgacgatttcgggtttatcgagcgggctgtcaggaatcggctggcaggagacaatcaggccaccgttagcagcgattttttgatccagttgtgcaagtaacgacatacatcttcccttagcgaaaggcccggtacatagaccgggcaacaggattaacttttggttttgactaaatcgtttttggcgctgccaaatggcacggcaccgctaaatggtttgccgtcgatagcgtcatgagtacgcaatgcttccgggcgcagccaacgctgaacgcgggaaggcatatccagaccaatcagcaggatcaccacaaatgtcaggctgaacgagagcgatgccagcgcagtacccagatccagacgttgagcgatcaacgcgccgatgattggggccagtgcgccacccaatgcgccaacgttgtaggtaaagcccaggcccgctgcacgctggtcggtatcgaaataaccgccaatcagtttcggtaagatcccggcgatcccttgtccaagcatttgctggaagaacagtaacagaccgagcacccagacgtttgcgccgccaatcgcaaataccggaataatcagcagctgcgaggccagcaggctacaaacgtacgctttgcgggttcccagccagtcaccgaggaagcctcctacgcagcatcccacggccgcgccaaagccactaaagaacagcacattggcgacagtatgcgggttataagccagatcggttttcagatacgttggcagcagcgcctgaatcggccatgagtagaggaaagcaaacaacacgaccaccatcagcattacgcccgttggccagcgtttgcctgtactctgcaccataaagctgataaagattgcggcgcataacagcccaagaacagcgacgatcgcggcattttgcaggttaccggcgaagcagaaccacagcgcagtagccgccgccagtgtcattacgatattggcaatgcgatgttcaccacggtagagaatatccaccattgtgcgtactggtgctttacctgcgtgtttctctttccagtcttccgcttccgggatgtttttacgcagccagagagcaaagatgattggcaaaatgccgataaagaacagcgcacgccaaccccagaccggaaccaccaggctatagacctgagcggcaacgacggcccccacagagaagcctgaaatcaaaaaaccactggctttgttacgcagatgttttggccagctttcaatgacataggtggcgctggaaccgtattcacccgccatccccatgccgatgaccagacgagcgataaacatggtgatgtagcctggcgcaaagccgcaggccagcgtcccggccgagaagagaacgatgctggtgaccattgccagacgacgcccgtagcggtcacccatagcgccgagcatcaggccgccgaaccagcgagagataaaggctgcggagatcagacttgccgcctgcaccgtcgtcagcccgaattcaccctgtacttcggtgagtaccagggcgattaaaacgaaatcaaaaccgtcaagcagatatcccaaccaggcagcggaaaatgcgcgccattgtgcacggttgagatggcgataccacgggatattctgggttgtagtactcattgtgagtctcccgcggtgggcgatgcccacacgctttggtatgaaaattgtagggtacagatgcgtttatttcccctcacccggtaggggcgagcgaggggaaaacaactcacccgcgctcttgcatcaactgctgggccagcgccttcagttctggcagatatttttcatctaccggtccaaacggtttgcggcacagcggcacagaaacgacatccatataatgcaggacagttttcaggccgcggaatacgccagttttgatcagtaaatcaatgactttgttgcactcagtttgcagtttctgcgcggtctggatatcgccttctttcagcgccttcacgatcccctgatatcgccagcccatgatgttgtaagtactgccgataccaccatcagcgcctgccagcaagccggaagcgaagatttcgtcgtaaccgttatagagcaccagatcaggatgttcacgacggatctgttccatctgatagagatcgccagaagtctgtttcagcgcaccgacgccaggcaacgtaaccagggtgttgatctgatccagggtcagttttaccccactcagggctggaatgttgtacacaaccatcggcaaaccatccgctgaatcaataattgcccgatagtgatcgcagtgttcttcaaagctgaaaggatagtagaacggcgtgacggcggagacggcatcgaagccataacgtttagccgatgccgcaagttgttggctttcggcggtgctgacgcaaccgacgtgggcgatgagtttaatcttacctttcgcctcttcggcgacgatttccagtacctgttcacgctcggaaaggctttgtacaaaggcctcgccggtcgaaccacccacgtataaaccgtcgatgccctgctgaatattgaactgaaccaggcgacgcagactcgctttatccagtgcttgttgttggtcaaaaggagtcaggagtgcagccattacgccacgtaaattcgttgccataaatacctctgaagtgatacttgtctgataaacgatatacctttatacctgttataccagatcaattaagcaacaccccatacagaaagcttataatgcgatctgcttcactaaagtggcattatttctttttgttggtggtctgaccgaaagcgtgccaggtagcagagacgctgttgagatgcgattgcaacgcacgatcggcttcgtcaggatcatgacggcggatcgcatcaacgatcgcaatatgctgttgatagctaacgttgttatgctcgtgcagagcctgatcagccacggttggacgtgcggcgatcagccagtcgagcagggcaacgtggatcgccatgaagattgggttaccagggatctccgccagcacgcggtggaaatcaacgtctgaacgaatgaatgccgcgttgttatccagcgactgactgttgatttccagtgcttttgccagcaaatcgatttgctcatcggtggcatgttcagccgcatagcgcaccagactggattcaaagaacagacgtaattgttcgaaatgggcaatcccaccgggatgagaaaggaaatctttcgccatgccggaaaactcaccgatgatagtgtccgcagaaggacgcgagacgcgagcgcgttcgccgttgtttatttgcaccagacctttgcgttttaacgctgccagcgcttcgcgcacagaaggacgcccgacgttaaagaacgccatcagttcgcgttcagacggtaattgttcaccttcgccaaattcacgacggcggatcatctgttccagctcttcttccaccatttcggagagttttttacgcgccagcgggcggctacgcaagttgcgaccaattgcaggtgaagaatcttcggtttgcgaatcaaatgcgttcataaggcccattctgtaaggtcagtgtgattaacatcatcagtgacatcctatcacaggattgaaagtaggggaaaatggcaggtttttctctttgtgcctcatcattaccataattaacggaataattaactattgcgaaaaattaatgtaacgcagataaacacatcccgattgaattattcataagactattcacaagcattatgaatattatgaatgtgttcttacaaaataatcataagcgcatattttttaatgaaaaatcacatcacctacaattaaaaacacgacatccgcaccataaatagacttgcaaaaaatataacatcattgttttcaatctgccgtttatgggattgaccgttttcttttgacacggagttcaacaatgttcggcataattatatctgtcatcgtattaattacgatgggctatttgatcctgaaaaactacaaacctcaggtggtgctggctgccgcaggtgtcttcctgatgatgtgcggagtctggttagggttcggtggtgtactcgatcccgccaaaagcagcggctacttgatcgtcgacatttataatgaaatcctgcgcatgctgtccaaccgcattgccggattggggctgtcgattatggcggtgggcggttatgcccgctacatggagcgcataggagccagtcgcgcgatggtgagcttgctaagccgcccgttaaaactcattcgctcgccgtatattattctgtcggcaacttacgtcatcggccaaatcatggcgcagtttattaccagcgcctccggtctgggtatgttgctgatggtcaccttatttccgacgctggtgagtctgggagtaagtcgcctctctgcggtggcggttatcgcaaccacgatgtccattgagtgggggattctggaaacgaactccatttttgcagcccaggtcgcgggaatgaaaattgccacatacttcttccactaccagcttccggtcgcctcttgcgtcattatctcggtggcgatctcccactttttcgtgcaacgcgcttttgacaaaaaagataaaaatatcaatcacgaacaggcagagcaaaaaactctcgataatgtcccgccgctctattacgccattttacctgtgatgccgttaatcctgatgctcggctcgctgttcctcgcccacgtcgggctgatgaagtcagaactgcatctggtggtggtgatgttactaagtttgacggtgacgatgtttgttgagttcttccgcaagcataacttgcgcgaaacaatggacgatgtgcaggcgttttttgacggcatgggtacgcagtttgccaacgtggtaacgctggtggtcgcgggtgaaatatttgcgaaaggcttaacgacgattggcactgttgatgcggttatcaggggtgcggagcattctggtctgggcggtattggcgtgatgattattatggcgctagtcattgccatttgtgccattgtgatgggctctggcaatgcgccgtttatgtcatttgccagtcttattccgaatatcgcagccggactacatgtaccagcggttgtaatgattatgccgatgcattttgccacgacgctagcgcgcgcggtttcgccgattactgcggtggtaaagcggacagcgatccccatggcagtcggtttcgtggtgaatatgattgccacaatcacgctattttattaagtcattaaaaagacaaaacaggccgcctgggcctgttttgtattacttcacaacacgtaatgccggtcgaccaccgcgtggtggctgcggaggttcatcgtcaggatgagtgtcatcatcgtgatctggcttgtcgccatcaataaccgacataacggtttcgttgtctgccgatgcctcttcatcattcatgatgctggtatcttcatcgtaggcagcttcaggctcaaacatcgtgcctgcgccattttcacgggcgtagatagccagcacggcagccagcggcacagaaacctgacgcggaatgccaccaaagcgcgcgttaaagcgcacctcatcattcgccagttccagattgccgacagcacgcggcgcaatgttgagtacgatttgcccgtcacgcgcatattccataggaacctgcacgccagggagcgtcacatccaccaccaggtgcggcgtgagctggttatccagcaaccactcatagaatgcacgcagcagatagggacgacgtggtgttagctgtgacaaatccatacagattaactccggcccagacgcatttcacgttctgcttcagttaaagaagcaaggaaagagtcacgctcaaagacgcgggtcatatagcctttcagctctttcgcacccgggccgctgagctcgatacccagttgcggcagacgccacagcagcggagcaagatagcaatcgaccaggctgaactcatcgctcaggaagtacggcttctgaccgaagaccggcgcaatcgccagcagttcttcgcgcagttgcttacgtgcggcatctgcttcagaagctgaaccgttgatgatggtgttcatcagcgtgtaccagtctttttcgatgcgatgcatgtacagacggctttcaccgcgagctaccgggtaaacaggcatcagtggcggatgcgggaaacgctcatccagatattccataatgatgcgagattcccacagggtcagctcacgatccaccagggtcggaacgctctgattcgggttgaggtcaatcagatcctgaggcggattgtccttttccacgtgttcgatctcgaaacttacacctttctcagccagcacaatgcggacctgatggctatagatgtcagtaggaccggaaaacagcgtcattaccgaacgtttgttggcagcgacagccatgaaaacctccaggtatagtcagaatttttactgctaccagccaccaggtggccagtcagaagttgtgttacccaataaggaacgactctctttgttcgaaaatcaaacaaaaaatgagcaatacccgacatttgggcagaaaattggatgatagtttaccagattttgcgaccattgtggtgagtggatgccggaaatggggaaaaagagatgcgctttagtctgaaatagttgacttagacccttattggcgatgtggtttttgttttgcctgtctttcagacggcagcaaaaagcaacttcccattttttacgctgattcagaatttagccataaaaaaacccgccgaagcgggttttttcgtaaattgttttctgccggagcagaagccaattaacgtttggagaactgcggacgacgacgtgctttacgcagaccgactttcttacgttcaacctgacgagcgtcacgagtaacgaagccagctttacgcagttcagaacgcagggactcgtcgtattccatcagagcgcgggtgataccgtgacggatcgcaccagcctgaccagagataccaccacctttaacggtgatgtacaggtccagtttctcaaccatgtcgaccagttccagcggctgacgaactaccatgcgggcagtttcacgaccgaagtactgttccagagaacgttggttgattacgattttaccgttgcccggtttgatgaaaacgcgagctgcggaatttttgcggcgaccagtgccgtagtattgattttcagccattgcctataatcccgattagatgtcaagaacttgcggttgctgtgccgcgtggttgtgctcgttacccgcgtaaactttcagtttacggaacatagcacgacccagcgggccttttggcaacatgcctttaaccgcgatttcaatcacacgctcaggacggcgagcaatcatctcttcaaagctcacttgtttgataccaccgatgtggccggtgtggtgatagtacactttgtcagtacgcttgttgccggttacagcaactttgtcggcgttcagaacgatgatgtaatcaccggtatctacgtgcggagtgtattccgctttgtgcttaccgcgtaggcgacgagccagttcagtagccagacggcccagagttttaccggtcgcgtcaacaacataccagtcgcgttttacggtttctggtttagctgtaaaagttttcattaaaagcttacccaataaatagttacacgttggtgaacacccaaacgtcttcaattgttgaggttcacacgacaaagtccggcaaacctaccccttcgaatagcctatgccagcacacaaaaagttttgggaaaaaaactttcttgtaacgtggggtcgcaggattatagagaagtcggggtcaaagatcgacccctttttgtgatttgtgacaggttttaacccgccaaatgctcgcgcttcagatactcttcgctttgcatctcttgcagacgtgacaggcaacgctggaactcaaacttcagccgatcgccctgataaatttcatacagcggcacttctgcactcaccactaatttgacatggcgctcgtaaaactcatccaccagcgcaataaagcgccgcgcttcgctctccatcaaccgcgtcataactggtacatcaaacaacatgaccgtatgaaagagacgtgagagcgcaatatagtcatgctgactgcgggcgtcgacgcacagcgtagtaaaagagaccgccagcgtctggttctcgacgcccattgtcgctaatggccgatggttgatttctaacgtcggtgaattttctcgtttcccccccgccagcgccaaccatagtttatccatttgcgcccgggtttcatcgtggagtggcgaaagccacagatgcgcctgagtgagtgtacgcagtcgataatcaacaccagcgtccacgttcattacatcacaatgctgtttaatggcatcgattgcaggcagaaaacgcgcacgttgcaagccatttcgataaagttcgtccggcggaatatttgacgtcgctaccagggtaataccgcgggcgaacaaggctttcatcagaccgccaagtagcatggcatcggtaatatcagaaacaaaaaattcgtcaaaacagagcacgtcagtttcggctttaaagcgatcggcaataatttccagcggatcggtctgcccctgtaaggcagttagctcttcatgcacccgcagcataaaacggtgaaagtgcaggcgctgtttccgctctcccggcaggctttgatagaaaaggtccatcagccaggttttcccgcgtcctacaccgccccacatatataagccacgcactggcgtatgctttgtgtcttcgcgtttaccccacagcttaccgacccgcgccattagcccactcgtcctgggggctggtggcgtgctattgatgagttcctgataaataatttccaggcggctgacggcctctttttgaacgtcgtcgggttgatggctgccttcattgagcgccttcaggtattgcgatgttggggtaacgctttgcatgatcttattgttattccttgaataatcggtgcgccgttgttcacggttgacgaaaaaaaggccgttctacactacgcgatatgcagtcgggattccacttctgtggaattaacggttatagtggcataatcagccgcaggcatggagcctgaagccaacaccctacggaaacaaaagacaacgggagatgttcatgacctgggaatatgcgctaattgggttagtcgtcggcatcattattggtgctgtggccatgcgttttggtaatcgtaaactacgccagcaacaggcgttgcagtacgaactggaaaagaataaagctgaactggacgagtatcgcgaagagctggttagccactttgcccgcagcgcggaattactggataccatggcgcacgactatcgccagctgtatcagcacatggcgaaaagctccagcagcctgctgccggaactgtctgctgaagcaaacccgttccgtaatcgtctggcagagtctgaagccagcaacgatcaggcaccggtgcagatgcctcgcgactattctgaaggcgcatccggcctgctgcgtactggcgcgaagcgcgactaatttatttttcgggcgcagccattgcgccctcctcttctctccctccccgactatcatttaatctggtgtctcattgttagccgtctgaaaattcaataacatcaaactgttttgaatctcttttcttatcattcaggtacgagagcaggaataatgaaaaaacaaccccagctgttgagtgcattagcgttaagtgtcgggttaactctctcggcgtcatttcaggccgtcgcgtcgattccaggccaggttgccgatcaggcccctctccccagtctggctccaatgctggaaaaagtgcttccggcagtggtgagcgtacgggtggaaggaacggccagtcagggacagaaaatcccggaagaattcaaaaagttttttggtgatgatttaccggagcaacctgcacaacccttcgaaggtttaggctccggtgtcatcatcaacgccagtaaaggctatgtgctgaccaacaaccatgtgattaatcaggcacagaaaatcagtattcagctcaatgatgggcgcgagtttgatgcaaaactgattggtagcgatgaccagagcgatatcgccctgttacaaattcaaaacccgagcaaattaacgcaaatcgctattgccgactccgataaattgcgcgtcggtgattttgccgtagcggtcggtaacccatttggccttgggcaaaccgccacctctggcattgtttccgcattaggacgcagcgggttgaatcttgaaggtctggaaaactttatccagacagatgcttccattaaccgcggtaactccggcggtgcactgttaaaccttaacggtgagttaattggcatcaacactgcaatccttgcgcctggcggcgggagcgtcgggattggatttgccatccccagtaatatggcgcgaacactggcgcagcagcttatcgactttggtgaaatcaaacgcggtttgttaggcatcaaaggcaccgagatgagtgccgatatcgccaaagccttcaaccttgacgtgcagcgtggcgcgtttgtcagcgaagtgttgccaggttctggctcggcgaaagcgggcgtcaaagcgggcgatattattaccagcctcaacggcaaaccgctgaatagctttgctgagttgcgctctcgtatcgcgaccaccgagccgggcacaaaagtgaaacttggcctgctgcgtaacggcaaaccactggaagtagaagtgacgctcgataccagcacctcttcgtcggccagcgctgaaatgatcgcgccagcgctggaaggtgcaacgttgagcgatggtcagctaaaagatggcggcaaaggtattaagatcgatgaagttgtcaaaggaagcccagctgctcaggctggcttgcaaaaagacgatgtgatcattggcgtcaaccgcgatcgggtgaactcgattgctgaaatgcgtaaagtgctggcggcaaaatcggccatcatcgccctgcaaattgtacgcggcaatgaaagcatctatctgctgatgcgttaatgtcgtaaaccgggcatcaggcttacgtgtgatgtccggttaactcgtggtatgctgctgccgttcccttttttaatgacgcctccatcatgtttgtgaagctcttacgttccgttgcgattggattaattgtcggcgctattctgctggttgccatgccttcgctgcgcagccttaacccgctttccactccgcaatttgacagtaccgatgagacgcctgccagctataatctggcggttcgccgcgccgcgccagcggtggttaacgtttacaaccgtggtttgaacaccaactctcacaaccagcttgagatccgcaccttgggatccggtgtaatcatggatcaacgcggttatatcatcaccaataaacacgtcatcaacgacgccgatcagatcatcgtcgccttacaggatggtcgtgtatttgaagcattgctggtgggatctgactctctaaccgatctggcggtacttaaaattaatgccactggcggtttacctaccattccaatcaatgcacgtcgcgtaccgcatattggcgacgtggtactggcgatcggtaacccgtacaacctcgggcagaccattacccaggggattattagtgccacgggtcgaattggtctgaacccgaccgggcggcaaaacttcctgcaaaccgatgcttccattaaccacggtaactctggcggcgcgctggtgaactcgctgggcgaactgatgggcattaacacgctgtcgtttgataagagtaacgatggcgaaacgccggaaggtatcggctttgcgattcctttccagttagcaaccaaaattatggataagctgatccgcgatggtcgcgtgatccgcggctacattggcattggcggacgtgagatcgcaccgctgcacgcacagggcggtggtatagatcaactgcaagggatcgtggttaatgaagtgtcacctgacggcccggcggcgaatgcgggtattcaggtcaacgatctgattatttcggtggataacaaaccggccatctctgctctggagacgatggatcaggtggcggaaattcgccctggttcggtgatcccggttgtagtgatgcgtgatgataagcagttaacgctgcaggtcaccattcaggaatatccggcaaccaattaagtcgagtgctcaaaacaaaaaaccggagtctgtgctctaatgccagtcagttaagcaactgactggctctttttcggggctgtggggtatttccagggcctctcctttaccactctcgggaaggccctttcccttctcgtcggtaatttcacaagttgtcccatacttgcaagatcgcgcatcagctccggtatacgtcccggtgaagcgccctgcaatgtcatcagcattctcatcaccattccgcatgattctgagaaactcagttgattcggccagtaacctttcagatgttccgccattttaatcatctgatatctcaccagattataagccagtaagacaccccacagctcttgctccacaagctccggctttttacttctcagcgtcagcctgctcagttgcatcgtctgttttatctccctgtatcccagttcgatttcccagcgatgactgtacagatccgccatttctcctccggggaagcgcatggcgtccgtcatcgacgtcagcagatggcagacttttcctttgcgcgtcacggtcagcaggcgggctgtcacttcatttcccagtcccggccacttttttcgtgcctgcgggctggttttcagcttcaccagatgatcgcctttacccagttttctgagctcttcatattgcgctccctttctgagaggtatcatccagtggcggtgttctcccgccaggctccaggcatttaacagtcccagtgagtaataacctttatccattaacgtcagagtgttatcgccggtttgttctataagttgctcagcaagctcattttcgctgttcttcatcgtgccgaaggctgcagccgtcagcagatggctggtcagttccatctggcagaccattttgacctgcgggtagagcgccgggttcccggcatgtgtctggcgggggaaggctgcatcgttctctggtgtatccggtgtgcgccagaacacaccatcgatggccagcagggtcaggccgcaccagtgcggatgcggcgtggcgttatgccagagctgcgctgttttcgtgaacacgcggcggacagcctcacttcccaggcgctggcgggcctgaataacggcactgggggcaacgaaggggcgattgcccggcagcatgatgtccaggcgattcacaatctggtgaagaggttctttacgctcaagcgccatgccaacaatacaccagaccatcatttcgaggggaagacggcgcttgcgtagcgttacagtacctgattcggcaaggcaacgagagatgagttcggggtcgaggtaatcccccagagaagtcagtgggttacgcagagaatcgtaacgggataccagatcaagagcctgtccaatgtgcataaaaaaatccggaaacaagtgagcgtttccggattcttacacagccactggatcggtcaactgatccttaactgatcggcattagagtctgtgctccggttttttattattcgctaatcaattacttattaacgaactcttcgcccaaggcgatatctttcttgagtgtatccagcataccttccagcgcgttctgttcaaatgcgctcagggtaccgatagatttacgctcttccacgccgtttttacccagcagcagcggttgagagaagaaacgggcgtactgaccatcgccttcaacgtaggcacattcgacaacgccttgttcgccctgcagtgcacgaaccagagacagaccaaaacgtgcagctgcctggcccatagacagggttgcagacccgccaccggctttcgcttcaaccacttcagtacccgcgttctggatgcgtttggtcagatcagccacttcctgctcggtaaaactaacgccaggaacctgtgacagcagcggcagaatggtaacaccagagtgaccgccaataaccggcacttcaacttcgcctggctgtttgcctttcagttccgcaacaaaagtgttggaacgaatgatgtccagcgtggtaacgccgaacagtttgtttttgtcataaacaccggcttttttcagcacttcagcagcaatcgcaactgtggtgttaaccgggttagtgataataccaatgcacgctttcgggcaggttttcgcaacttgctgtaccaggtttttcacgatgccggcgttaacgttaaacaggtcggaacgatccatacccggtttacgcgctacacctgcagagataagaacgacatctgcgccttccagcgccggagtcgcatcttcaccagaaaaacctttgattttcacagcagtagggatatggctcagatcgacagccacaccgggagtcactggagcgatatcatacagagagagttctgaacctgaaggcagttgggtttttaacagtagtgcaagcgcctggccaataccgccagcagcgccgaggactgcgactttcatcctaaactccttattatattgataaactaagatatgttgctccgctgccgcgaccttaatccacaaaattgccgtttacaatgaccacatctcaagaatgtgtagtcacgcaagtttagcgtttatgcatttaattgccgtaatcaggaacctaacttacgtaattaacagtcgcttatgcattagcgcaacattccaacaggtggtgacaatataccctaccgttcagccaaaacaacatcaatttgataacaattaatttacttttaaacagaatttgcatgccgtgacgcaggcatgtttctcaataacgaaatttgataaaatcccgctctttcataacattatttcagccttcttcagggctgactgtttgcataaaaattcatctgtatgcacaataatgttgtatcaaccaccatatcgggtgacttatgcgaagctcggctaagcaagaagaactagttaaagcatttaaagcattacttaaagaagagaaatttagctcccagggcgaaatcgtcgccgcgttgcaggagcaaggctttgacaatattaatcagtctaaagtctcgcggatgttgaccaagtttggtgctgtacgtacacgcaatgccaaaatggaaatggtttactgcctgccagctgaactgggtgtaccaaccacctccagtccattgaagaatctggtgctggatatcgactacaacgatgcagttgtcgtgattcataccagccctggcgcggcgcagttaattgctcgcctgctggactcactgggcaaagcagaaggtattctgggcaccatcgctggcgatgacaccatctttaccacccctgctaacggtttcaccgtcaaagacctgtacgaagcgattttagagctgttcgaccaggagctttaatctctgccccgtcgcttctggcggcggggaaaatgttgcttattcctctcaaccccctgctttcccctgcgattaatttaacgaatagtgcgttttaccgcgacatatcattcacacaatgaatacatacggtaaaaaaagcacattatgtaaaattcattatctaattgaaaatactagaattaacaataaataaccgtgtttttaattcttttttgttattaaaattcacatttttaacacttagtatcaactgaaacagttagcgtggtattaattagttcaataattagtgtatgcttgattttgtgatatgggtcacgaaacaaaggcccagctaaaagattatgtcgaggtaaaaatcatgaaaatcaaaaccactgtagctgcattaagcgtactttctgttctctctttcggtgcattcgctgccgactccattgatactgcacaagcacaaaatcgtgaagcaatcgggaccgtatccgtaagtggtgtggcgtcttcgccaatggatatgcgtgaaatgctgaacaaaaaagcggaagagaaaggcgcaacggcctaccagattactgaagctcgtagcggtgacacctggcacgctacggctgaactgtacaaataaaccctcatcgtcttgtccgacgatattgcccccggttcgggggcttttttttgcgctaatgacgaacattaaaacgcaaatgcccttccagctcttcctctgcctcatcaaacagcaatattaacgcgccaaaacggcgacgcgttttctctcccagatgaacaaattcaatctcaagtggtagcggcaggacatcgttcattaacacatcccatagtgagtcgagatcgcgtaccttatctttagccagaccaaaggtttggctaaagtcacgataaaaatcctcctgactctcaatctcatcaaaatcaaaggtataaatattcatctgttgccaccgtcacgtttcgcggcgagttctgccgtgcatcgctaagtatagccatgaaaaaaccgacgcttttggcgtcggttttgacttaactatcggtcaacgcatgttgatacttatggagcatccccgccagccgatgaaccggttccgtcacctgcggtggcgcttgccagatgcgtagcttttcctggtagatttccagttcttccagcaactggccaaagtaccgacgacgtttatcatcgctacgggcagatatcacatggtctgctgtgcggcgcatttgtcggtgaaacgccgataaatcctcgttaaccgggatcggcgcatcacgcaggcgctggtgcgcgataatcatcgtcagcgccaggcgaaatttcggcaaatcccctgggaacttattcatcagcaaaaacagctgctgataaagtgccgggaggtggttctctttacgacgtgccacattggtagtcatcgcggaaacagcggcaaaaacaaactgattaagcagtacacgtccagtcctgtcgcgcgatttatcccgcaccagcaaaataacggtgaacgcgagcacacagccgacgatttgccctaatgcgctgtcgagaaactgactgaaatggaaagtcatcgggttatccagcacgataatatttatggtgctggccagtgcccccatcgagcccagtcgccgtttctgtacttctataccgaggaagaatcccagcactgccaggctaatacacagcagcaacatgctctgttgggtattagggataatcaccaaaaagtagagcagccctaacggcagcgcggccagcgtcccatagataaagtcgatcgccaccatgcgtggattcggcaaacgcattgccagtgacgtcacgaccgcaatcatcaccattgcaccactgccggaagtccagcccgtccacagccagaaaagcgtgcccagaatgcaggaaagtgtggttcgccagaagttaaccattgcatgatgacgttcggctgactctacttttacttccggttcgccttgcaggatctcttcttcggtggcgttgatttttgtgttactgataacgccgcgcttgagaagctgataacgcgttgccgccgcgacccagctataaatggtgacaggcgtttcccgttccccggtccaggcgataactctccgcaggcgtttgagctgcttgtggacgtcctgcgcggtttctaccggcgtgtcaaaaaattcgcggaaagtatcagtgatcaattccgggcgcgtattctgaataagataagtttcgcaggattgggtaatcagcgtcagcgatagcgtattgatcgcttttaaacgtcgattggcccgcgcccagcgggaagattccatattcaggttgctgcgcatgccttgtagtgccgtggtgcgtcgcaccaggtcgccccaggctttatcgacaacttcaccatcgccatgcttgatacagagttgcattaattgatattgcgcgaccagcaaactttccagctctcgatctacttcttgtttgatcgatcgcggagaaaagagcaaatccgccataatcgcacacacaataccgataacgatctcgctacaacgttcgacggcaaactgcggcgtaagcaatggttccggctgaatggtgatcacaatgatcagcgcggtataaccggccagcccccacgcgtacgagttttctattcgtaccagcgaggatatccaggtacaaaaaccggcccagatacagcacaccagaatcatcaataatggtgcgcggatcatcgcaatgatgatcaccagtccggcaatacagccaataaatgtgccgatgatgcgcaaaaagccacgatagcgaatagcgccagaatacggttcacctcccgcagcaaaggccggaccggcggcaacaatcgccgctgtcagtaccgcccagcgtggcgtttccagctggaagtgaaagccaacaaacagcgccagtacaatggcggtcgccagttttaccgcaaagcgaatatgttggttagcaatggagaaaatacccatcgtgattaaccaaactcacgcaggcgatgggccattttacggaagaacgaatcctggctttcgtcgcgatcttgtttgccagtgaccaccactgtagcagtggtgcccgcaggccagatgttctcttgctggttgtcgagacgaatacgaaccggaacacgttgcgcaagacgcacccattcaagattagagtctatagtcgccatccctttgtcgtcacgcgtgctgctggcgttggtgacccctgcggcaacactatcaacagtccctttcagcactttgttactgccaagcggcgtgatctctgcacgataccccggacgccccccttccagcttagtttcttccatataggccagtacatagaaggagttctgtttcaccagcgcaaccgccgttgatcctcgagtaataaactcaccggtatagacgttgaggttggtcacccagccatctgctggcgcgcggatcaccgtgcgttcaagatccagttttgccagatcgcgggtcgcctgcgctttcgctaactgatgcagaaccgtttgtagtacgttgttggcctggtcgatctcttcgcgagacatcgcctgcacaccgagacggttacgacgtccggcctcctggcgtttctcctgtgccagtacctgataataagcaacatcggcttgcgcttcctcaagcgccttttgatagcgcggctggtcgatggtgaacagtatctgtccttttttcaccagctggttatcatgaacattcacctgggtaatgagtccagaaacgtccggcgcgatcgcaacgacgtcagcgctaaagcgcgcgtcacgcgtccagggggattcggtgtaatagacccaggcattaaaaattgcgatgaaggctagaatgactaatacgaccgtgatggccgtacgggagaattttcttattagtgttttcacttcaacctcaaacgaacagtcgcgatatcaaataaaacaagcagcaatagagcgcggtgttgaacaacgccggatgccagacaaagtcgtagatacctgttggcacaagtacccggcgcaccagccagaaaatcgccagtgataaaagcaattcaaaaaatatcggtgggaaggacagtccaaacaccacgataacgggaaacagactcatgttgaccttggttgtaaagagagagcaggcgttattattttcagcatctgtcgccgcagagaagggcatggaaagccgggcgagagcaacattgctgtagattgatatttaatatattagcgtaactgttatgctgttatctatattatgtgatctaaatcacttttaagtcagagtgaataatggaacgactaaaacgcatgtcggtgtttgccaaagtagttgaatttggctcttttaccgccgccgccagacagctacagatgagcgtttcgtccatcagtcagacggtgtcaaaactggaagatgagttgcaggtaaagctgttaaaccgtagcacacgcagcattggcctgaccgaagccggcagaatttactaccagggctgccgtcggatgcttcatgaagtgcaggatgttcatgagcaactgtatgccttcaataacacccccatcgggacgctgcgcattggctgttcttcaactatggcacaaaatgttctcgccgggctgacagcaaaaatgctgaaagaatacccaggtttgagcgtcaatctggttaccggaattccagcccccgacctgattgccgacggtctggatgtggtgatccgcgtcggcgcgttgcaggattccagcctgttttcccgccgtctgggcgcgatgccgatggtggtgtgcgccgcgaaaagctatctcacacaatacggcataccggaaaaacccgccgatttgagtagtcattcatggcttgaatacagcgtgcggcccgacaatgaatttgaactgatcgcaccggaagggatctcgactcgcctgatcccacaaggaagatttgtgactaatgatccgatgacgctggtgcgctggctgacggcgggtgccgggatcgcctacgtgccgctgatgtgggtgatcaacgagatcaatcgcggtgagctggagatcctgctgccgcgttatcagtcagatccacgcccggtttatgcgttatataccgaaaaagataagctgccgctgaaggtacaggtcgtgatcaactcgctgacggattattttgttgaggtcggtaaattgtttcaggagatgcacgggcgcgggaaagagaagtaattcatattgtactgttacgttctacaaacctgtgccaacgggttcccctcaccctaaccccagaggagcgaggggaccgttcgtgcacgtagaaagattaattatccttctgaaaataatgaaattattacgcagtaccgccaacagtcaggttatcaactttcagcgttggctggcccacgccaaccggcaaactttgcccttctttaccgcagacacccacgccgttatccagtttcaggtcgttgccaaccatcgaaatctgctgcatggtttcgataccggaaccaatcaacgttgcgcctttcaccggcttcgttactttaccgttttcaatcagatatgcttctgaagtggagaaaacgaatttgccggaggtgatatccacctgaccgccaccaaagttcggtgcatagataccgtactcaacggattcaataatttcctgcggggtcgatttacccggcagcatataggtgttagtcatacgcggcatgggcagatgggcgtaggattcacggcgaccgttgccagtcggcgtcatccccatcaaacgcgcgttgagtttatcctgcatgtagcctttcagaatgccgttctcaatcagcacgttgtactggcctggcgtaccttcgtcatcaatcgccaccgaaccacggcgatcgaccatcgtgccgtcatcaaccacggtacacagttctgaagccaccagctccccgacctgcccactaaatactgaagtgccgcggcggttgaagtcgccttccagaccgtgacctaccgcttcatgcaacagcacgcccggccaacctgcgccaagtactaccggcatggtgcccgctggtgcagcaacggcagaaagattgaccagcgccatacgcactgcttcttttgcccatgcatccgcacggacttcgccgtcaagatcggcaaggaagaactcataaccaaaacgaccgccgccgccactggcaccgcgttcgcgtttgccatcttcttcgaccagaacgctcacggaaagacgcaccagcggacggacatccgccgctagcgtgccgtcggtggccgcaaccagaattaattcatagacaccactgaggctggcagtcacttcctgtacgcgcttgtccgcttcgcgagcaaccttatcgacgcgacgcaggatatccagcttctcttcacggctcatgctttgcagcggatctaccgaggtatacaacgggctatgctctaccgcgcccagcgtctgtactttgccatcaccactatcacggacgatggtgcgcgccgcttgcgcactctgttccagcgccagcaggctgatttggtcagcgtaagcaaatccggttttttcaccgctgattgcacgcacgccaacgccctgatcgatgttgtaagaaccatctttaataatgcggtcttctaaaacccaggattcgtgatagctcgactgaaaatagagatcgccataatcaaggcgacgttcggccagttgaccgaggatcgcgaacaagtcctgatgtttcaggctgttcgccgctagcaattgttcacttaccaggttcagactcatcgtttttgctactcgttagttactgcagtagaggattttttacggctgccggatgcggcatgaacgccctatccggcctacggttatgttctggctcgttggcctttggcaacgattatcatatgagattggggcaattacgcgccctcgtcaaatcattgcgctttttctttacgcggttggcgcaacacttcgttgatttgcggatcgtccagcggacccgaaatgtgatagcgcaaaatggagactttgctccacagcggccccagcactttactagcggcaaaaactgccgcgccaacaatggggttaaccgcaaaagccgcagccacgcccaccgtcgcagaaatctctggtgcgacaaccgcttccatattcaggtcgcgacgtaccagatttaccgaccctttcatggcgatatccgcctccaggccatccaccagcgtgtcgtcggtgtgcataaccccgtctttaatccacgcggtgctgcgaatggagtcaaaatagaacccttcgccaaaagtgtctctgaaatcaaaacgcagcttacgcatcagggcatctacgctcaataagcgcagcaattgcccggcatgtccggtattgatttcggtaatttcgcctttacccagttgagtatgaatgatgccattcaacgtcgcttcatctggctgccagggtgctttgcgccagtgtaaatcgtaatccacattaaatgacgactggcgtatgggcgtcgtgacaccaaaaaattctgcggcggcatcaattttctgcccgcgcagttttcctttcagcgaggtacgttcattccccggattattaacccattcaccatcggcagtaagccgcgagaaaccagtatcaatcagtccattggtcagcgttaacgtatcgccagaaatggtgatatcactgtcaatgcgaccgaatttttgcccccagaaccagcactctgtgcatcgtatttgtgcgtccggccagccacggaagttaatgcgctccgttgtcgggaaaggtgatgacggcgttgaatcaccacgagttttcgccacgctcgggttgtaataaagatatttgatattcgccagccacggcgcgttattacgcatcgctagcgtggcgttgatttcacgcccttgcgcctcaaccagggtgccatttgccgtcggttgcgaaacaatactcaggttattccattgctgatttcccagtgacaacataggcgtacgtaacgttatgtattgtgggaaactcgctgcaccaccgacactctccgcagcgcctttctggaacagggccagccactcggcaccattcatcggcggcatattgagttcaacgccactttgttccggcaacggcgggagcgttttactgtctgccgcccaaatagcacgatcgagcgtcagcttttgaccaagcaaccagcggctattgaaatggttatccgcaccagcctgtccggttaattcaaagctgttgagattgccatcaaccttaacgtttaccgctagtggttcacccgcaggtttggctaacggtgaaggtaagtgactactcacattattcagatcgccgttcagctctacgttataggtcgcgccagcatgataaggcagatcaatgcccactttaccatcccacgccacgctgccactcaatgcttcgttcaccgcttcaggcagaacgccggttttcgccggttgccagttaccgttgagattcaccgcaacctggtaggcttttgccccttctttggtggaaaaatccacgttcaacggctgattaaaccagcttgctgtcagtggttcactttgcagatcgccattgataaagctgaatttaccgctcaaatttttcagggtgctgtcgagtggtttgataaacagactgttattacgcagcgtcacttcacctttcgcggttaccagctcgccgttcagcgggatatcaagatgtaagcgagcattcacatcgccgtcgagctggagttcttgcagggtcgcacccagagaatctttcagcggtgtctcatcaaagtaagggccaacggctttacccggacctttaatgtcagcgtcaatcagcagtttttctttcgagtagtcagggatcactgcggtgagattactcgcgcgcacgccgcccagattaacgccatcggttttcatccataaaccgtcgttaataaagtccagttcaatatcaaggttagttaatgcaggccagtccggctggaaggcaaacttcgcgttgcgcagcggcaccagcacttcaaactgaccttcgttgtgtttataggggaagagttgcggattgccaccataaaccagcgtcgcgttatccgcttcaccgccctgaatcgcgccacttaagtaatcaaccaggtctttacccatcaagttttccgggaaatagtgccaggcttgtgaaccatcatcggtactgatgccagccagaatacccagccagggttcatcgttagcaggttgcaggtaacgaaaaccgccgcgcgcatggacggctttggctttaacgtcaatattacgcccatccagctggaaacctttgtcattgttcagccagcttatagttgcctggccgtcggcgatttccagtggcgcacggaataccgtttcgtaaggcatctttgcctgcttcatcgacgcggtaagcaaaccattttcaacgctgccggaaagcgtcccggagaagtgttccgcacccggtaataatttccattgcttccaggccagatcgctccacgatgcctgaaaacgggtcttgtctgccgcctgaagcgggatatccagcgccagagtgttaatcttgccgctcggttgtgtggagcgccaaacatcacccagtgcaggtgaaagtttcgcggccagcgggcgtatgccctccaggcctgccagctccagattactggcgcgaatccggagttcgtcactgcgtttattgtctttgccgccaacgtcctgttccggtatccaggccagcgtcaatgctccgctcggccagggtttgccgtccatcgtgatccgtgtatcgggaatagagaactgccagcccggattttcacgcgtaatatgcgcggtcagattatccaccgacagcgtatgcgtttgcttctcgcccaaccagctggcaccgccctgtttcagccagacgtcaccgccggttacatcgcctttgtcgatcgtcatccagccttcaagggagaactgtgccgtttccagagcaatattgtcctgcatccatttaccgagccacggcttcaggtcgatgtcatccgcctgtagccagacgcgaccattgcttaacaacccctcatcatcgcgcaaatccatgcgcacctgcatcacgccgtgctgtccggtaaggctggagaggcttaccaggccttccgcacggtgtcgacgtggatcgttcagccaggtgagttgtgggatcgccagctcggcacgctgaccggatggcgtcaggaaactgacttcactgtcgcggagatcgaaatggtcaaattgacgaagaaacagatcgctgatgtgactggcttccagactgtcatcgctaccaccgctggtgataggagtgttggtgcgaaagcgcagctgccagaaagtgaggtcgcgaaactgccagcgcatatgtaacaggctctgccagacatccagcgccagagtaacgcgtttaaccgaaaattcgccgccatcttttagttctgcacggatgtcgtgtgcttcaagcgtcgggccaaaattctgccagctggctgagagctgactggcttctaccggcatgccagtcgcggattctattttgttgaggatttccggacgccaggcgtcaagatgcggtaaagcaatacgcaggccgctaaccagcagggcagcgatcacaacgagcgcggctccagtaagcagtaaaatccccggcaatcgcctcacccgtcactccttgtctgctaaaaatgtgactcaaaaaccctttgccggatggcggcccagcatctgtttacatcattacgacgtcaaactgctcctggttatagagcggttcaatttgtactttaacctgtttgccaacgaaaatttccacttccgccagcgagtgtgactcttcgcctttcaaggcttcggctactgccggagaagcatagaccaggaaacggtcggagtcgtaagcatggtggacacgaacaatctcgcgcatgatttcatagcataccgtttccacggttttcaccgttccgcgaccgtggcaggttgggcattcgttacacagtacgtgctcaatgctttcgcgggtgcgtttacgcgtcatctccaccagccccagcgccgaaaaaccattaacgctggttttcacccggtctttgctcaacgcctgctccagcgagtgcagcacgcggcggcggtgatcttcattattcatatcgatgaaatcaataatgataatcccgcccagattacgcaaccgtaactggcgagcgatagcctgcgtcgcttcaatattggtattgaaaatggtgtcgtccagattgcgatgaccgacaaacgctccggtattgatgtccacggtggtcatcgcttcggtctggtcgataatgagataaccaccggatttcagttctactttgcgttccagcgctcgctggatttcgttttcgacatcaaagagatcgaaaatcggctggcgtccggtgtaatgctccagcttgctggtcatctcgggaatgtactccgaggtgaactcaagtaatgcttcgtaagtcaggcgtgagtcaacgcgaatgcggtccagttcggcgtcggcgaaatcacgcagaacacgctgagccagcgccagttcgccgtacagctgataacgggtctgcgggcgctttttacgctccataactttggtccagacgcgtttcagataagcggcatcggaggccagttcagcctcgccaaccccttccgctgcggtacggatgataaacccgccctgctcgtcgcaatactctgcgaccacttttttcaggcgttcacgttctgattcgctttcaatacgttgggaaaccccaacgtgagaagcccctggcataaagaccagatagcgagaaggcagcgtgatatcggtggtcaggcgcgcacctttagtgccaagcggatctttcaccacctgcaccatcagatcttgcccctgacgaaccagttccgagatgtcgcgcaccgtgaattgcttttgttcttcacccgccacacattcggtgtgcggcatgatatcggatgcatgaagaaacgcggctttatccagcccaatatctacaaaagccgcctgcatacccggaagtacacgacttacacgacccttgtagatattgcctactattccgcgtcgcgcctcacgttcaatatgaatttcctgcagaataccgccatcaatatacgccactcgcgtttccgaaggcgttacgtttactaacaattcagccgtcatgtttatcccttttctcacgcagtgcgttaaaattacttaataattcatacgtttcaaccagaggtaagccgactacggcgtgatagctgccatttatcttcctgacaaaacagccacccagcccctgaataccgtatgcacctgctttatctaacggttcaccgctggcgacatagcccgcgatgtcttcgtctgttaacgttctgaaagtcacatcggtgaccaccaggcaatcgagaatgtgctggctgtcggccaacgccactgccgtcatcacctgatgggtctgacccgataatttgcgcaacatctgcgccgcatgctctgcgtcgcgcggtttctccagcacttctccattcaggataacgatagtatccgcacccagcaccgggagatcctgcgccgtttgcgcgacacccgcctgtgctttctcgcgcgccagacgcacaacatactgctgcgcgctctcctgcggctgacgctgctcctcaatgcccgtaacaatacgttcaaaggtcacaccaagttgcgcaagtaactcctgacgacgcggagaaccggaagctaaatacagagaagtcatagaaacctttattgcactgcaaactgctgacggactttacgcatcagcaagaaaatccacggccagagcaccccattgactacactactccagaacacttccggtctgaaagagacgttaatcactaaaaactctgcccagaaaacaataatatccaccaccagcgaaagcaacatgacgaccagcgcctgctgccataatgcgaggttgcggaaaagctggtatttcagcgccaccaggtaagcaatgatgctcatcgccaatacgcgtacgccaagcgtcgagccgctgatcagatccagtatggcacccatcacaaaacctgtgcccacatttacgcgatgaggcaaggccaggatccaatacaacaagatgagtaacacccagtttggccggaaaacaatcaggttatccggccagggcatgatttgcagcaacagcgcaatgaggaaagagagccagattacccaacgtccctggctacgatagctcgccactattgccctcccggcgcacgcgcaggcggttgagcaccactttgcggcggcgtagccctttgtggagagcgattagcagcaggctgtgtgggcgcagcaggcgcagtagctgcatttcctgtcgtcggttgctgcggagtcggctgagcgatccccgttgccggttcaggtaactttggccccatcgcgtctggcgaaggcaatacctgcggcatcatctgcatcagacgttcattagcaacacgatgcacctcttccggcgtcatcgggttagcgccgttacgatccgcgccccacagcagcagcagataacgcaaacgttgcagtcctgcagtcggacgcgcctgaatcacagtataagcgcgctgggtatcgagttttacggaagagacaaccgcgaccggatagccttccgggaaacgaccgcccagaccggaggtcaccagcacatcaccaacacgaatatccgtattcgctggcagatgctcaagctgcaaatcatccgtacaaccgttaccggctgcaattacgcggatatcgttgcgcagcacctggattggcagcgcgtgggtcgcatcacaaatcagcagcacgcgactggtcagtttagcgacggccaccacctgaccaacaacacctttgtcgctgatgaccggctggccttcataaacgccattaacgctacctttatcgataacaacttgatcgctataaggatcgttaaccgtggagataacctgagtcaccattttctgctcatcctgacgcagcggggaacccagcagctcgcgcagacgcgcgttctcctgtttgtattgtccaagcatcagcagttcactgtttttcagcaacagttcctgacgtaacgcccggttttcaagttctagttggtcacgcgaggccagcgtctgcgatacgccatccagcaattcacgaggagcattggaaacaaagtagaaaggactgacggcggtatccatataagtacggatttgactgaacgtccccaggcggctgtcggcaataataatgccgagcgccaccagcaccgccagaataaggcgaatctgtagcgacgggccacggctaaaaattggcttcataagttatgcgtattctcgtatcagaccaggcagggtaaacagacatttcccctgcctgcatccgattactcttcgctgaacaggtcgccgccgtgcatgtcgatcatttccagcgctttgccgccaccgcgcgccacacaggtcagcgggtcttcagcaacaactactggaatgccggtttcttccattaacaaacggtcaaggttacgcagcagtgcgccaccaccggtgagcaccatgccgcgctcggagatgtcggaagccagttccggcgggcactgttccagtgcaaccattaccgcgctcacaataccggtcagcggttcctgcagtgcttcgaggatttcgttggagttcagggtaaaaccgcgtggaacaccttctgccaggttacggccacgaacttcgatttcacggacttcatcgcccgggtaagccgaaccgatttcgtgcttgatacgttctgcggtggcttcaccgatcagagaaccgtaattacgacgcacatagttgatgatagcttcgtcgaaacgatcaccaccaatgcgcacggaagaggagtaaaccacgccgttcaaggagataacagcaacttcagtggtaccaccaccgatatcaaccaccatagaaccggtcgcttcagaaaccggcaggccagcaccaattgcggcagccatcggttcttcaatcaggaagacttcacgggcaccagcgccctgcgcggattcacgaattgcgcggcgttcaacctgggtcgcgccaaccggtacacaaaccagaacgcgcgggcttggacgcataaagctgttgctgtgcacttgtttgatgaagtgctggagcattttttcagtcacgaagaagtcggcgataacgccgtctttcattgggcgaatggcagcaatattgcccggcgtacggcccagcatctgcttcgcgtcatgacctactgcagctacgcttttcggtgaaccggcacgatcctgacgaatggccaccacggaaggctcattcaatacgatgccttgtccttttacataaatgagggtattcgcagtacccaggtcaatggacaagtcattggaaaacatgccacgaaattttttcaacatactaagggataatcctgaaagctggggcggaaaagaaaatccgcttactttaccaaccacacgcagcagcgacaaggcgcaaaaatcatctgctacggtgaaaattagtgcagttcgtttcctttgttacaaatctctgcctgagtccagaaaggcttaatgcatcagcagcattcctcgcctgtttgcaaccgcgtaaggtcattcatctgcatatgtgctgcaacaatctggcgagcagacaagcacactcccatgagacgcagcgcgcgttattctacgtgaaaacggattaaacggcaggttaaaccgagtatctttgtgaatattttttcacgttagtatcaagtggctgtgaggacgcgaaaaaatccccttgcccgcctgtaacaccgcgctgaatcagggtctgccactcgcttcgcgaacgcacgccggtggcgtaaacgtgggtgctggtcccggagcaggcttccaccaggctttgaaccagcagctggttctccgttcgcttctcaatgtttctgaccagccccggatggagcttgagtaactcaacattaagttctttgatccaactggtgcttaccagcgtcaaaccagcctggttgacggctacccgtacccctaaagcattcactaaacgaataacaggttgtaaacgactgatatgttgacctacatcggcctctgcaagttcaataattatgcgttttcgttgtgatttttcacattgcattaacgtatcgcgcagccaacgctgaaaacgcgggcgaatcagcgactcaacggtaacctgaatcgccagattttcctctggccagtaacgcaatagtggaataagacggctgatttgcagacggtcatactcttccgataagccaaactgcaagaccatcggcatatactccgccgagctaacctcttcattaccatcgaagatgcggcacatgagttcgcgatgatgaacctgaccttcgcgagtaaccgccggtttttgataaaggcgcgggccgccgcgactgagcatttgctcgataagcgtacgccagcgaacattaccgcgtcctttttcaggcaacgagtcatcgtaaatagcccagctattgccgccctgcaatcccgcattacgcgtggcagactctgcatgttccattacctgctcggtatcctgaccactacgccaggcgcagataccaatgtggatcatatcgtcgcgatcgagcattttattgttcggcaaggtatcgacggctttgattaactgaccggcgatgctctctgcctcttttaacgtccggtgcggtaacagcgcagcaaaatcactgcggtggtaacgcgccagcagtgcgccagggtagcgcatcataaatgtcgacagcagattagtcagagtgaagaactgttcttcaacctggctgtgcccccaagtatcgctcaacatattgaaatccggcagacgaatcatcatcacgatcccgtgggtacctactttctcctgatcttccagtaacgttgctaactgattatcgaaaaagagtcggttattgaggccggttttcacgtcctgggcggcataagagcggatcagcgtatcaagacggctgtgttgttcgcgtgcgttctgaatttcacgaagcagcgtatctagcgcactgctggttctgggcggccattcatagatggttcccaacacattagagccacgctcaccgtttaagatacgagtagcccgggtttccagcaattcttgcccggcaagttgccgttgtaaccagcgtaccgccaggaagagcataacaatgataaagccaatcgcccccgtgagcggcgcggtagtcattaaagaatggaaatagttgcccatcggatcctgataaaccagacgcagcgacatccccggatgctttatcaacggaacactcagttcgcgaaacagatcgctggagccaaccggacgataactaccatttctggccagggtataaacctgtttatcaccatggagcaggtctacacgaacgatatctgccgacatcattaattcggtaatttgtggccttaatgtgctgaagtcattcgacacaaggtgggtatcaatcgccgtcgccaccgcctgaacgcgatgactaaacttatactgaattgcgttgtagaaacttagcgaacagcccagcaaagtcacaaaaattgttaacccggtgagcagcgtaacaaaggccgaaaatttcgtcgttaatctcatccttgtgttaactccgatagtgaggaagcgggcatactagcaaatcagatttatctcgcaatttattgcgcttcatcggctttgcttttccattagcgagtataatcttcagaaattattttccaatccatcatgcacatgaggaccacttatgcaggcgttacttttagaacagcaggacggcaaaactctcgcatcagtacagactctggacgaaagtcgcctgccggagggcgatgtcacggtcgatgttcactggtcgagcctgaactataaagatgcgctggcgattaccggtaagggaaaaatcatccgtaattttccgatgattcctgggatcgattttgccggaactgtacgcaccagcgaagatccgcgttttcatgccggtcaggaggtgttactcactggctggggcgttggtgaaaaccactggggtgggctggcggagcaggcgcgagtgaaaggtgactggctggttgccatgccgcaagggctggacgcgcgtaaagcaatgattatcggtactgccggttttaccgccatgctgtgtgtgatggcgctggaagatgccggtgttcgcccgcaggacggggagattgtcgtgacgggtgccagtggtggcgtcggcagtaccgccgtggcgctgctgcataagttgggttatcaggtcgttgccgtttccggtcgcgaaagtacccatgaatatctgaaaagtttaggtgccagccgtattctccctcgtgatgagtttgccgaatcccgtcctctggaaaaacaagtctgggctggggcaattgacactgttggcgacaaagtgctggcaaaagtgctggcgcaaatgaattacggcggctgcgtggcggcctgtggtctggcgggtggttttactctgccaaccacggtcatgccatttattctgcgtaatgtccgtttgcaaggggtggattcagtaatgacgccaccagaacgccgcgcacaagcctggcagcgactggtcgccgatttaccggaatcattctatacccaggcggcaaaagagatatctctgtcagaggcaccgaactttgccgaggccatcattaataaccagatccagggtcgcacgctggtgaaggttaactaaccatttagcaaggaataataagagagggaactcattttgacatcattattcaatcggttaacgggaaaagcggttagccggacagctttcgtcgaacaccttggtcaggaagttgtacaacatcatccaaactggaaagtcatgatttcgactgaccacaaattgatgcgcattgatactcctctaaacagccattattgatacgcctccgtcgcctgttaggtttatggtgctttgcctgggcgacactacgcttaacctgttactgatttctggtaccatggggtgaataatctgattttatttgactacaaattaaccactcgaacctatttaatgctgagaattgtcagtcggttgattttgcgtgctttagcattcacatctatccagacgatgcagtgaaaattgggtaatccccagcaaccgctgcgtaatgtcgtctatcttgtcgcgatcctggcatccctacattatttgtggtctgtgaagattatctcattgcagcccctcatcttcgcagggctggctttacagcttttcaccttacgttataagaagttccgtcgatgatggcgctaatttcgtgaattgtgcggcttgttgcaaattacacggtgttgaaggttatttacatgttagctgttgattatcttccctgatgagaccagtatttagctgccaattgctacgaaatcgttataatgtgcgacctcgtcctccctgacgcagtttttgcgctgcggaaaaggtgacattggcgcaacgaaggtatattttgttttttgccggaggatagcagcagatcgctgcacaatgtccgtcaagtctaacattgatactctggggcaaaatagaccggcgtcccggcctgctggaatttatcgctatgcatacagctgtcggggcatacgctttacagacggcggtgaaacgcctgtcacaatcacactaaacaaagagtacggaacccactcatggatattcgtaagattaaaaaactgatcgagctggttgaagaatcaggcatctccgaactggaaatttctgaaggcgaagagtcagtacgcattagccgtgcagctcctgccgcaagtttccctgtgatgcaacaagcttacgctgcaccaatgatgcagcagccagctcaatctaacgcagccgctccggcgaccgttccttccatggaagcgccagcagcagcggaaatcagtggtcacatcgtacgttccccgatggttggtactttctaccgcaccccaagcccggacgcaaaagcgttcatcgaagtgggtcagaaagtcaacgtgggcgataccctgtgcatcgttgaagccatgaaaatgatgaaccagatcgaagcggacaaatccggtaccgtgaaagcaattctggtcgaaagtggacaaccggtagaatttgacgagccgctggtcgtcatcgagtaacgaggcgaacatgctggataaaattgttattgccaaccgcggcgagattgcattgcgtattcttcgtgcctgtaaagaactgggcatcaagactgtcgctgtgcactccagcgcggatcgcgatctaaaacacgtattactggcagatgaaacggtctgtattggccctgctccgtcagtaaaaagttatctgaacatcccggcaatcatcagcgccgctgaaatcaccggcgcagtagcaatccatccgggttacggcttcctctccgagaacgccaactttgccgagcaggttgaacgctccggctttatcttcatcggcccgaaagcagaaaccattcgcctgatgggcgacaaagtatccgcaatcgcggcgatgaaaaaagcgggcgtcccttgcgtaccgggttctgacggcccgttgggcgacgatatggataaaaaccgtgccattgctaaacgcattggttatccggtgattatcaaagcctccggcggcggcggtggtcgcggtatgcgcgtagtgcgcggcgacgctgaactggcacaatccatctccatgacccgtgcggaagcgaaagctgctttcagcaacgatatggtttacatggagaaatacctggaaaatcctcgccacgtcgagattcaggtactggctgacggtcagggcaacgctatctatctggcggaacgtgactgctccatgcagcgccgccaccagaaagtggtcgaagaagcgccagcaccgggcattaccccggaactgcgtcgctacatcggcgaacgttgcgctaaagcgtgtgttgatatcggctatcgcggtgcaggtactttcgagtttctgttcgaaaacggcgagttctatttcatcgaaatgaacacccgtattcaggtagaacacccggttaccgaaatgatcactggcgttgacctgatcaaagaacagctccgtatcgctgccggtcaaccgctgtcgatcaagcaagaagaagttcacgttcgcggccatgcggtggaatgtcgtatcaacgccgaagatccgaacaccttcctgccaagcccaggcaaaatcacccgtttccacgcacctggcggttttggcgtacgttgggagtctcatatctacgcgggctacaccgtaccgccgtactatgactcaatgatcggtaagctgatttgctacggtgaaaaccgtgacgtggcgattgcccgcatgaagaatgcgctgcaggagctgatcatcgacggtatcaaaaccaacgttgatctgcagatccgcatcatgaatgacgagaacttccagcatggtggcactaacatccactatctggagaaaaaactcggtcttcaggaaaaataagactgcaaaagcgtcaaaaggccggattttccggccttttttattactggggatcgacaacccccataaggtacaatcctcgctttcttcacccatcagggacaaaaaatggacactcgttttgttcaggcccataaagaggcgcgctgggcgctggggctgacccttttgtatctggcagtttggttagtagccgcttacttacctggcgttgcccccggttttaccggctttccgcgctggtttgagatggcctgcatcctgacgccgctactgtttattggactgtgctgggcgatggtgaaatttatctatcgcgatatcccactggaggatgacgatgcagcttgaagtaattctaccgctggtcgcctatctggtggtggtgttcggtatctcggtttatgcgatgcgtaaacggagcaccggcaccttccttaatgagtatttcctcggcagccgctctatgggcggtattgtgctggcgatgacgctcaccgcgacctatatcagtgccagttcgtttatcggcgggccaggagctgcttataaatacgggctgggctgggtattgctggcgatgattcagcttcctgcagtctggctttcactcggtattctcggcaagaagtttgcgattcttgcgcgccgctacaatgcagtgacgctgaacgacatgctgtttgcccgctaccagagtcgtcttctggtgtggctggcgagtttgagtttgctggttgcgttcgttggggcaatgaccgtgcagtttatcggcggtgcgcgcctgctggaaaccgcggcgggtattccttatgaaaccgggctgctgattttcggtatcagcattgcgttgtataccgcctttggcggctttcgcgccagcgtgctgaacgacaccatgcaagggcttgtgatgctgattggcaccgttgtgctgcttattggcgtggtacatgccgctggcggcttaagcaacgcagtacagaccttgcaaaccatcgatccgcaactggttacgccacaaggcgctgacgatattctgtcgcctgcctttatgacgtcgttctgggtactggtgtgctttggcgtgattggcctgccgcatactgcggtgcgctgtatctcttataaagacagcaaagcggtacaccgggggatcatcatcggtacgattgtagtcgcaatcctgatgttcggtatgcacctagccggagcgttaggtcgtgcagtgatccccgatctcaccgtaccggatctggtgatcccgacgttaatggtaaaagtgctgccaccgtttgctgccgggatctttctggctgcacctatggctgcgatcatgtcgacaattaacgcccaattgctacaaagttccgctacgatcattaaagatctctatctgaatatccgtccggatcaaatgcaaaacgagacgcgtctgaagcggatgtcggcggtaattacgttagttctcggcgcgttgctgctgcttgccgcctggaagccgccagaaatgatcatctggctgaatttgctggccttcggtgggctggaagccgttttcctgtggccgctggtgctgggtctttactgggaacgcgccaacgccaaaggcgcgctaagtgcgatgatcgttggcggcgtgctgtatgccgtactcgcgacgctgaatattcagtacctgggcttccaccctatcgtgccctcgttactactaagtttgctggctttcctggtcggaaaccgtttcggtacatccgtcccgcaagctaccgttttgactactgataaataaagagttttgccatgccttggatccaactgaaactgaacaccaccggcgcgaacgctgaagatcttagcgatgcgctgatggaagcgggtgccgtttctatcacttttcaggatacccacgatacgccagtatttgagccgctgccgggcgaaacgcgcctgtggggcgacaccgatgtgattggtctgttcgacgctgaaaccgatatgaacgacgtggtggcgattctggaaaaccatccgctgctcggcgcaggcttcgcgcataaaatcgaacaactggaagataaagactgggagcgcgaatggatggataatttccacccgatgcgctttggtgaacgactgtggatctgccctagctggcgtgatgtgccggacgaaaacgccgtcaacgtgatgttagatccagggctggcgtttggtacgggtacccatccaactacctctctgtgcctgcagtggctcgacagcctcgatttaaccggtaaaatagtcatcgactttggctgtggttccggcattctggctatcgcggcgctgaaactgggtgcagcaaaagccattggtattgatatcgatccgcaggcgattcaggctagccgcgacaacgccgaacgtaatggcgtttctgaccgtctggaactctacttaccgaaagatcagccagaagaaatgaaagccgacgtggtggtcgctaacatccttgcaggcccattacgtgaactggcaccgttaatcagcgtcctgccggtttcaggcggtttgctgggcctttccggtattctggcaagccaggcagagagcgtttgtgaagcttatgtcgacagcttcgcactggacccggtcgtggaaaaagaagagtggtgccgcattaccggtcgtaagaattaaccttcgcatcgccgtagggtgacgcggggcgaagtgcgagcaagctcacaaaaggcacgtaaatttgccggttatttacgcaaatttgcgtgccaaaattttcattcataaagaaaaattgagaacttactcaaatttctttgagtgtaaattttagtcactattttctaatatgatgatttttatgagtaattatctcaccacgctcattttaaatgcaattctttgatccatctcagaggattggtcaaagtttggcctttcatctcgtgcaaaaaatgcgtaatatacgccgccttgcagtcacagtatggtcatttcttaactcatgcgcatcggacaatatcagctcagaaatcgcctgatcgcagcgcccatggctggcattacagacagaccttttcggacgttgtgctacgagatgggagccggattgacagtatccgagatgatgtcttctaacccacaggtttgggaaagcgacaaatctcgtttacggatggtgcacattgatgaacccggtattcgcaccgtgcaaattgctggtagcgatccgaaagaaatggcagatgcagcacgtattaacgtggaaagcggtgcccagattattgatatcaatatgggttgcccggctaaaaaagtgaatcgcaagctcgcaggttcagccctcttgcagtacccggatgtcgttaaatcgatccttaccgaggtcgtcaatgcagtggacgttcctgttaccctgaagattcgcaccggctgggcaccggaacaccgtaactgcgaagagattgcccaactggctgaagactgtggcattcaggctctgaccattcatggccgtacacgcgcctgtttgttcaatggagaagctgagtacgacagtattcgggcagttaagcagaaagtttccattccggttatcgcgaatggcgacattactgacccgcttaaagccagagctgtgctcgactatacaggggcggatgccctgatgataggccgcgcagctcagggaagaccctggatctttcgggaaatccagcattatctggacactggggagttgctgcccccgctgcctttggcagaggttaagcgcttgctttgcgcgcacgttcgggaactgcatgacttttatggtccggcaaaagggtaccgaattgcacgtaaacacgtttcctggtatctccaggaacacgctccaaatgaccagtttcggcgcacattcaacgccattgaggatgccagcgaacagctggaggcgttggaggcatacttcgaaaattttgcgtaaacagaaataaagagctgacagaactatgttcgaacaacgcgtaaattctgacgtactgaccgtttctaccgttaactctcaggatcaggtaacccaaaaacccctgcgtgactcggttaaacaggcactgaagaactattttgctcaactgaatggtcaggatgtgaatgacctctatgagctggtactggctgaagtagaacagcccctgttggacatggtgatgcaatacacccgtggtaaccagacccgtgctgcgctgatgatgggcatcaaccgtggtacgctgcgtaaaaaattgaaaaaatacggcatgaactaattcaggttagctaaatgcttgattaaaaaggcgctactcggcatggggaagcgccttttttataggtgtcacaaagggagtgaccatgagaacaggatgtgaaccgacccggtttggtaatgaagctaagaccattattcacggtgatgcccttgccgaacttaaaaagctacctactgaaagcgtcgatctgatctttgccgacccaccgtataacatcggtaaaaattttgatggtctgatcgaagcctggaaagaagatctgtttatcgactggctgtttgaagtgattgtagagtgccaccgcgttctgaaaaagcagggcagcatgtacattatgaacagtacggaaaacatgccctttatcgatctccagtgccgcaagctttttaccatcaaaagtcgcatcgtctggtcatatgacagttctggagtacaggcgaaaaaacactacggctccatgtacgaacccatcctgatgatggtgaaagacgcaaagaactacacattcaacggtgatgctattctggtagaagccaaaaccggatcgcagcgcgcgttgatcgattatcgcaaaaatcctccacagccatacaatcatcaaaaagtaccgggtaacgtctgggattttccgcgcgtgcgttatttgatggatgaatatgagaaccacccgacgcaaaaaccggaagccttactgaaacgcattattctcgcctcttccaacccaggcgatatcgttctcgacccgtttgccggtagctttactaccggtgccgtagccatcgccagcggacgaaaattcattggtattgagatcaacagcgagtacatcaaaatggggcttcgacggctggatgtcgcgtcgcattactccgcggaagaactggcgaaagtgaaaaaaagaaagaccggcaacctgtcaaaacgaagccggttaagcgaagttgaccccgatctcattgcaaagtaaaggaagtgtaagcctggttttcagattattcatttcgtgtatatttcctgccagacttggttaaacatgcacaggctcaggtaatgattcgcaagtattggtggctcgtcgttttcgctgtcttcgtttttctgtttgatactttactgatgcagtggattgaactgctgacaacagaaacagacaaatgccgtaatatgaactcagtttatccactaaaactggttaactgtgacgaactgaattttcaggacagaatgtgaatttacatgacacttaattcattcgtttgatgaattaatttcgttatgttttcatctggcatgaacattcttaatacgttatcgaccagcgcgggtgcttgtttataaagatcataacccgccatattcattaaccagttttgaacaattccgctgaaggcaccatcaataataatcatcacaacatctaaatcgaggttatttgctacacaaccttgttgctgacacgcctgcaatacttcgcggagagtctgcggattaaagcccatcttttcgcgtatcactccctcggccagcatcccatcattaaattcacatttgtgatataagattttcagcaacgcctgctggcggggaattttggcaatatattgcaagccgacaatcaatttttcacgcaattgttgaaacgggtcatgctctaatccagccgtcaagtgttcctggattaactcccgcaatgaaggctgttgcaaccacatctcattaaacagttgggtcttgttctcgaagtgccagtagatagcgccacgcgtaacgttagcggcatcggcaatgtcgttgaacgtcgtcttgcttacgccatgttgcgcaaactgggcgatggcagtttcaatcagttcttgccgggtcttcagagcttcggctttggttctttttgccatgattaattattcaggaaataaatatattcgacacagggtgagaaaatagcgaaggttaatctatcatctaatgtgtatttatacgagagggtaacattgagttgctataaatcgtcaaataaataatatatattatttacctaaaatacattcgccacatgaatatatatttcaatttacgaggttttaattctgcctctttcaacccgcgtcaaaataaaacagtagaatattaatctttttttgtgtttatgtgccttgagacgccagtattcataactattccttacatcgacgaatgataatttgtaggatagcaaactgtatttttctttctgcgagttaacgcgttgcctttctgggtaaataacgcgcttttgtttttttgaggaatagtaatgacgaaacatgccaggtttttcctcctgccctcctttattctgatctccgcggctttaatcgtcggttgtaacgataagggagaagagaaagctcacgtcggtgaaccgcaggttaccgttcatattgtgaaaacggccccgttagaagttaagactgaattaccaggccgcaccaatgcttaccgtatagccgaagttcgcccacaggttagcgggatcgtactgaatcgtaatttcactgaaggcagcgatgtacaagcaggccagtccctgtaccagatcgatcccgcgacctatcaggcaaattatgacagcgcgaaaggcgaactggcgaaaagtgaagccgccgccgccatcgcgcatttgacggtaaaacgttacgttccgctcgtgggtacgaaatacatcagccagcaggagtacgaccaggccattgctgatgctcgccaggccgatgccgccgtgattgccgcaaaagccacagtcgaaagcgctcgcatcaatctcgcttataccaaagtgactgcgccaattagcggacgtatcggcaaatcgaccgtgaccgaaggcgctcttgtcactaatgggcaaacgactgaactggcgactgtccagcagctcgatcctatctacgttgatgtgacccaatccagcaacgattttatgaggctgaagcaatccgtagagcaaggaaatttgcataaggaaaacgccaccagcaacgtagagttggtcatggaaaacggtcaaacctatcccctgaaaggtacgctgcaattctctgatgtgaccgttgatgaatgcaccggctccataaccctacgtgctgtcttccctaacccgcaacatacgcttttgccgggtatgtttgtgcgtgcacggattgatgaaggcgtccaacctgacgccattcttatcccgcaacaaggcgttagccgcacaccgcgtggtgatgcaaccgtgctgattgttaacgataaaagtcaggtggaagcgcgccctgtcgttgccagtcaggcgattggcgataaatggttgattagcgaaggtctgaaatctggcgatcaagtcattgtcagcggcctgcaaaaagcgcgtccgggagagcaggttaaagccactaccgatacccccgcagatactgcatcgaagtaaggtaatctgacatggcaaacttttttattcgacgaccgatatttgcatgggtgctggccattattctgatgatggcgggcgcactggcgatcctacaattgcccgtcgctcagtatccaaccattgcaccgcctgcggtttctgtttaggcaaactatccagggtgctgatgcgcagaccgtgcaggatacggtgacgcaggttatcgaacagaatatgaatggtatcgataacctgatgtatatgtcctccaccagcgattccgccggtagcgtgacaattacccttaccttccagtccgggaccgatcctgatatcgcgcaagtgcaggtgcagaacaaactccagctcgccacgccgttgctgccgcaggaggttcagcagcaggggatcagtgttgaaaagtccagtagcagctatttgatggtggcgggctttgtctctgataacccagacaccacacaggacgatatctcggactatgtggcctctaacgttaaagatacgcttagccgtctgaatggcgtcggtgacgtacagcttttcggcgcacagtatgcgatgcgtatctggctggacgccgatctgctaaacaaatataaactgacaccggttgatgtgattaaccagttgaaggtacagaacgatcagatcgctgccgggcagttgggcggaacgccagcgttaccagggcaacagttgaacgcctcgattattgctcagacgcggttaaaaaatccggaagaattcggcaaagtaaccctgcgcgtaaacagtgacggctcggtggtacgcctgaaagatgtcgcacgagttgaacttggcggtgaaaactataacgttatcgctcgtatcaacggaaaaccggcggcgggcctggggattaagctagcaaccggcgcgaacgctctcgataccgcgaaagccattaaggcaaaactggcggaattacagccattcttcccgcagggaatgaaggttctctacccttatgacaccacgccattcgtccagctttctattcacgaagtggtaaaaacgctgttcgaagccattatgctggtgttcctggtgatgtatctgttcttgcagaatatgcgagcaacgctgatccccaccattgcggtacccgtggtgttgttagggacgtttgccatcctcgccgcttttggttactccatcaacacactaacgatgttcgggatggtgcttgccatcgggctgctcgtcgatgatgcgatagtggtggtggagaacgtcgagcgcgtgatgatggaggataagctcccgccaaaagaagcgacggaaaaatcgatgtcgcaaattcagggcgcactggtgggtatcgcgatggtgctgtcagcggtatttattccgatggcattcttcggcggttctactggggcaatttatcgccagttctctatcaccatcgtttcggcaatggcgctttctgttctggtggcattgattcttacccctgcgttatgtgcaacgctgcttaaacccgtctctgctgagcatcacgaaaataagggcggtttcttcggctggtttaataccaccttcgatcatagcgttaaccactacaccaacagcgtcggcaaaatcctcggttccacaggacgatatttactgatctatgcgctgattgttgcaggaatggtggtgttgtttttacgtcttccgtcttccttcttacctgaagaggatcagggtgtctttctgaccatgattcagttacccgctggcgcgacgcaagagcggacgcaaaaagtgttggatcaagtgacggattactatctgaataacgagaaagcgaacgtagaaagtgtctttacggttaacggctttagcttcagcggccaggcacaaaacgccggtatggctttcgtcagtctgaaaccgtgggaagagcgtagtggtgacgaaaacagtgcggaagcggtaatccatcgtgccaaaatggaattgggcaagatccgcgacggttttgtcattccattcaatatgccagccattgttgaactgggcacggcaacgggtttcgactttgagttaattgatcaggctgggctgggtcacgatgccctgacccaggcccgtaaccagttgcttggcatggcggcgcaacatcctgccagcttagtcagcgtgcgtcctaatggtctggaagacaccgcgcagtttaaactggaagttgaccaggaaaaggcgcaggcattaggtgtttcactttctgacatcaatcagaccatttcaacggcgctgggtgggacttacgttaacgacttcatcgaccgtggtcgcgtgaaaaaggtgtatgttcaggcggatgccaaattccgtatgctgccagaagatgtcgataaactttatgtccgcagcgccaacggcgaaatggtgccattctctgcctttaccacttcacattgggtgtatggctctccgcgactggaacgctacaacggtctgccgtcaatggagattcagggggaagccgcgccaggaaccagttccggcgatgccatggcattgatggaaaaccttgcgtcaaaattacctgcgggcattggttatgactggacaggtatgtcgtatcaggaacgcttatcgggaaaccaggctcccgctctggtagcaatttcctttgtggttgtcttcctgtgccttgctgcactctatgaaagctggtcaattcctgtctcggttatgttggtcgtgccgttagggattgtcggcgtgctactggcggcaacactctttaatcaaaaaaatgacgtctactttatggtgggcttgctaacgacaattggcttgtcggccaaaaacgctattttgattgttgagttcgctaaagatctcatggagaaaaagggtaaaggtgttgttgaagcgacactgatggcagtacgtatgcgtctgcgtcctatcctgatgacctctctcgcctttattctcggcgtattaccgctagctatcagtaacggtgccggcagtggcgcgcagaacgcagtgggtatcggggtaatgggaggaatggtctctgcaacgttgctggcaatcttcttcgtaccggtgttctttgtggtgatccgccgttgctttaaaggataaatcagaaacataaaggcactttcgggtgcctttattattttcagtgaaacccataaaaattaataatatattcttctactcactctttaaaaactttctatagttcccgctcccttcactatttttacaattcacataatttgtcattattcattccgcaatatttataacctccggtgataaaatggcattcagctcgttaataagagagttggtgatgctgccaacttactgatttagtgtatgatggtgtttttgaggtgctccagtggcttctgtttctatcagctgtccctcctgttcagctactgacggggtggtgcgtaacggcaaaagcactgccggacatcagcgctatctctgctctcactgccgtaaaacatggcaactgcagttcacttacaccgcttctcaacccggtacgcaccagaaaatcattgatatggccatgaatggcgttggatgccgggcaactgcacgcattatgggcgttggcctcaacacgattttacgtcacttaaaaaactcaggccgcagtcggtaacctcgcgcatacagccgggcagtgacgtcatcgtctgcgcggaaatggacgaacagtggggctatgtcggggctaaatcgcgccagcgctggctgttttacgcgtatgacagtctccggaagacggttgttgcgcacgtattcggtgaacgcactatggcgacgctggggcgtcttatgagcctgctgtcaccctttgacgtggtgatatggatgacggatggctggccgctgtatgaatcccgcctgaagggaaagctgcacgtaatcagcaagcgatatacgcagcgaattgagcggcataacctgaatctgaggcagcacctggcacggctgggacggaagtcgctgtcgttctcaaaatcggtggagctgcatgacaaagtcatcgggcattatctgaacataaaacactatcaataagtttgagtcattaccttagcatgttatatcgcgttatttcgctgctttcgaaataacgcatcaatttaactttcacacctcccaccagaaatatactcacgctaacaatcattattctgcttagtaaaacacgcgtaaatattttgcgccaaaatgtggcgcatgtttcattttcgcaccattgcggggcgctgtttttattatttcctgtctacactcagcttattgcgacgcgaaatcgtgcgcaaaagatggcactacttttgcttataagaggatggccacagacaggtaaaagacgtttcccaaacgtcctataacgataattttcgcctcacaggaagcattatgaaaaagatgatgatagccacactggctgccgccagcgtgctgcttgccgttgcaaatcaggcgcatgctggcgcgacgcttgatgccgtacagaaaaaaggttttgtgcaatgcgggatcagtgatggattacctgggttctcttatgccgatgcagacggtaagttttcaggtattgatgtagatgtttgtcgtggtgttgccgctgctgtatttggtgacgacacgaaagtgaaatataccccgctcactgcaaaagaacgcttcaccgctttacagtcaggggaggtggatttgctctcccgtaatacgacctggacttcatctcgcgatgccgggatgggaatggcatttactggcgtcactgattacgacggcattggcttcctgacgcacgataaagcggggctaaaaagcgcgaaagaactggatggcgctaccgtctgtattcaggcgggtacagataccgaactcaacgtcgccgactatttcaaggcaaacaatatgaagtacacaccggtgactttcgatcgctctgacgaatcagcgaaggcactggaatctggtcgctgcgatacgctggcctcggatcagtcgcaactgtatgccctgcgcatcaaattaagcaacccagctgaatggattgtcttaccggaggttatctctaaagaaccgcttgggccggtagttcgtcgtggcgatgatgaatggttctcgattgtacgctggacgcttttcgccatgctgaatgctgaatgctgaagagatgggcatcaattcccagaacgtcgatgaaaaagcggctaatccagcaacgcctgatatggcacatctgctgggtaaagaaggcgattacggcaaggatctgaagctggataataaatgggcctataacatcatcaaacaggtgggtaactactcggaaattttcgagcgtaacgtaggttcagaaagcccgctgaaaattaaacgtgggcaaaataatctctggaataacggcggtattcagtacgcgccgcccgtgcgttaagtcggtgtgaggtaacgagcgtcgctacggcggcgctctcttcagcgttatgctttccgaggtttctatgtctcatcgccgctcaaccgttaaaggctcactctcttttgccaaccctacggttcgtgcctggttattccagatccttgccgttgttgctgttgtcggcattgttggttggttatttcacaacactgtaacgaatctcaataatcgtggcattacttcaggttttgcctttctggatcgcggcgctggcttcggtattgtccagcatttgatcgattaccagcagggcgacacctacggacgcgtttttattgtcggcttactcaatacgctactggtttctgcattgtgtattgtgttcgcttctgttttgggcttctttatcggtctggcgagactttcggataactggctgctacgaaagctttccacaatttatattgagatcttccgtaatattcccccgctgctgcaaatcttcttctggtactttgccgtgttgcgcaatttgcccggaccacgccaggctgtgagcgcgtttgatctggcctttttgagcaatcgtgggctttatattccgtcaccgcagctgggagacggatttattgcgtttatcctggctgttgttatggctatagtcctttctgttgggctattccgctttaataaaacataccagataaagaccggacaactgcgccgcacctggccgatcgccgcagtgttgatcattggtttgcctttactggcgcaatggctttttggcgcagcactacactgggatgtcccagccctacgaggctttaacttccgcggcgggatggttttaattcctgaactggcagccttaacgctggcactttcggtttatacatctgcatttatcgccgagattatccgcgctgggatccaggcagtgccttatggtcaacatgaagcggctcggtcactgggattacccaacccggttacgctacgctaggtcattattccccaggcactgcgagtgattattccgccgttaaccagccagtatctcaacatcgtcaaaaactcctctcttgccgccgctattggctatcccgatatggtttcgctgtttgctggcaccgtgctgaaccagacggggcaagccatcgagacgatagccatgaccatgtcggtctatctgattatcagcctgactatctcgctgctgatgaatatctataaccgccgcatcgcgatcgttgaacgctaaggagtcatgatgacaaaagtattgctgtctcagccctcgcgcccagcgagccataactcaagccgcgcgatggtgtgggtgcgaaaaaatctgttctccagctggagcaatagcctgctgactattggctgcatatggttgatgtgggaactgatcccaccgttgctgaactgggcatttttgcaggctaattgggttggctcaacgcgtgccgactgcacaaaagccggtgcctgttgggtcttcatccacgaacgatttggtcagtttatgtatggactttacccacacgaccaacgctggcgaattaacctggcattactgattggccttgtgtcaatcgcaccaatgttctggaaaatactcccgcatcgcggtcgctatattgcggtctgggcggtgatttacccactgattgtctggtggctgatgtatggcggtttttttggtctggagcgggttgaaacccggcaatggggcgggctgacgctaactttaattattgcatccgttgggattgcgggggcgctaccgtgggggatcttactggcgttaggtcgccgctcccatatgccgattgtgcgtatcttatcggtcatttttatcgagttctggcgcggcgtaccgctgattactgaggtgtactggcaatagcggacactaccatttgttctttttttaagcagccatctgatgatatttttccctgaaggctgccggggagatattccccagacgagagtgacgacgctgacgattgtagaaaatctcaatgtattcccgtattactgagatggcttcatcccggttattaaaacgatagtggctcaggctctcatttttcagcgttccccagaagctttccatcggagcgttgtcgtaacagttacctttacgcgacattgatgttttcagaccagactgctcctgtatgacccggtaatcgtatgcgcagtactgtgaacctcgatcagagtggtggattagcccggcaggtgggcgctggctcctgagcgccataaacagggctttacctgtcagctcttttgtcatgcgctctcccatggcgtagccgacaatttcgcacgtataaacatctttgatgccagcgaggtacaaccatccctcctgtgtggcaacatacgtcaggtccgccacccagacctgatttggtgctgtaggagcgaacgtctggttcagcagatttggcgcaactggcagattgtggttcgagttcgtagtcgctctgaacttgcgtttctgcttacagcgtagccttagctccttacgaagacgtgccagtcggtcacgaccaacgatgatgccattctctgccagctccgtctggagccgccgggttccatatgtttcgcgagtgcggatatgtgccaccttaatctccagttttagccgctcatcactttgttttctgtctgagggttcatgctgtacccagttgtaataaccgctcctggatacaccaaatacctgacacatcgcttcaatgggaaattgttgtcgccattgttcgattaacgcgtatttttcagcgactcctgtgcaaaatacgctgttgctttttttaatatatctcgctcaaggcgagcttcatttaacgccttacgcagttgcagaatttcagattccagttcagccaccgtgcgggaaccaggagtaccgagcccttttctggcggcggtaacccattgtcctaaagtgccttcaggaagagataatcgggaagcgccttcactgatcgaaagttgattttcaagaaccgttctgacagcttcggctttgaactctttagagtaacgttgggtttttctgctcattattagctccttctgatgccattctatttcaggaaggagtgtccgttaaactcaggctacctcataccgtattgtttatgtcttcggtcatgctgcctttgtttatggcagaaggcaccaatatcgacaaactgatccgcgcgctggttggcgtgatcctgtttcagtcagcatatgttgcggaagtcgtgcgaggcggattacaggcgctgcctaaagggcaatatgaagcggcagagtcactggcattgggttactggaaaactcaggggctggttattctgccacaggcgttgaagctggtaattcctgggctggtaaataccatcatcgcactcttcaaagataccagcctggtgatcattatcgggttgttcgatcttttcagtagcgttcagcaggcaaccgttgatcccgcctggttgggtatgtcgacggaagggtatgttttcgccgcactgatctactggatcttctgtttcagcatgtcgcgctatagccagcatctggaaaaacgttttaacaccgggcgtacaccgcattgaggacactatgagccaaattttactgcaacctgctaacgcgatgattacgctggaaaacgtcaataaatggtatggacaattccatgttttgaaaaatataaatttaaccgtgcaactgggagaacggatcgttctgtgtggcccttctggttccggtaaatcgacaaccattcgttgtattaatcatctggaagaacatcaacagggacggatcgtagtagatggcatcgaacttaatgaagatatccgcaatattgagcgcgtcaggcaggaagtgggaatggtctttcagcatttcaatctcttccctcatctgaccgttctacagaactgtaccctggcaccgatttgggtacgcaagatgccaaagaaagaggctgaagctctggcgatgcattaccttgagcgggtgagaattgccgaacatgcgcataagtttcccggacaaatttctggtggtcagcagcaacgcgttgccattgcgcgttcgctgtgtatgaagccgaaaattatgttgtttgatgagccaacgtcggcgctcgatccggagatggtgaaagaggtgctggatacgatgattgggctggcgcaatcgggtatgacaatgttgtgtgtaacgcatgagatggggtttgcgcgaaccgtcgctgaccgggtgatttttatggatcgtggggaaatagtggagcaagctgcacctgatgaattttttgcgcatcctaaatcagagcgtacgagggcatttttatcgcaggtaatccattaattgaatgttagttcgaaaagcaaaaaggccatcctttcggatggcctttcgcttgatttgatgtctggcagttccctactctcgcatggggagaccctacactaccatcggcgctacggcgtttcacttctgagttcggcatggggtcaggtgggaccaccgcgctactgccgccagacaaattcttttctaatctgccgaactttaacctaaaaagtggtgctgatacccagagtcgaactggggacctcacccttaccaagggtgcgctctaccaactgagccatatcagcacgctaaatttgatgcctggcagttccctactctcgcatggggagaccccacactaccatcggcgctacggcgtttcacttctgagttcggcatggggtcaggtgggaccaccgcgctacggccgccaggcaaattctgttttatcagaccgcttctgcgttctgatttaatctgtatcaggctgaaaatcttctctcatccgccaaaacatcttcggcgttgtaaggttaagcctcacggttcattagtaccggttagctcaacgcatcgctgcgcttacacacccggcctatcaacgtcgtcgtcttcaacgttccttcaggacccttaaagggtcagggagaactcatctcggggcaagtttcgtgcttagatgctttcagcacttatctcttccgcatttagctaccgggcagtgccattggcatgacaacccgaacaccagtgatgcgtccactccggtcctctcgtactaggagcagcccccctcagttctccagcgcccacggcagatagggaccgaactgtctcacgacgttctaaacccagctcgcgtaccactttaaatggcgaacagccatacccttgggacctacttcagccccaggatgtgatgagccgacatcgaggtgccaaacaccgccgtcgatatgaactcttgggcggtatcagcctgttatccccggagtaccttttatccgttgagcgatggcccttccattcagaaccaccggatcactatgacctgctttcgcacctgctcgcgccgtcacgctcgcagtcaagctggcttatgccattgcactaacctcctgatgtccgaccaggattagccaaccttcgtgctcctccgttactctttaggaggagaccgccccagtcaaactacccaccagacactgtccgcaacccggatcacgggtccacgttagaacatcaaacattaaagggtggtatttcaaggtcgactccatgcagactggcgtccacacttcaaagcctcccacctatcctacacatcaaggctcaatgttcagtgtcaagctatagtaaaggttcacggggtctttccgtcttgccgcgggtacactgcatcttcacagcgagttcaatttcactgagtctcgggtggagacagcctggccatcattacgccattcgtgcaggtcggaacttacccgacaaggaatttcgctaccttaggaccgttatagttacggccgccgtttaccggggcttcgatcaagagcttcgcttgcgctgaccccatcaattaaccttccggcaccgggcaggcgtcacaccgtatacgtccactttcgtgtttgcacagtgctgtgtttttaataaacagttgcagccagctgatatcttcgactgatttcagctccatccgcaagggacttcacctacatatcagcgtgccttctcccgaagttacggcaccattttgcctagttccttcacccgagttctctcaagcgccttggtattctctacctgaccacctgtgtcggtttggggtacgatttgatgttacctgatgcttagaggcttttcctggaagcagggcatttgttgcttcagcaccgtagtgcctcgtcatcacgcctcagccttgattttccggatttgcctggaaaaccagcctacacgcttaaaccgggacaaccgtcgcccggccaacatagccttctccgtccccccttcgcagtaacaccaagtacaggaatattaacctgtttcccatcgactacgcctttcggcctcgccttaggggtcgactcaccctgccccgattaacgttggacaggaacccttggtcttccggcgagcgggcttttcacccgctttatcgttacttatgtcagcattcgcacttctgatacctccagcatgcctcacagcacaccttcacaggcttacagaacgctcccctacccaacaacgcataagcgtcgctgccgcagcttcggtgcatggtttagccccgttacatcttccgcgcaggccgactcgaccagtgagctattacgctttctttaaatgatggctgcttctaagccaacatcctggctgtctgggccttcccacatcgtttcccacttaaccatgactttgggaccttagctggcggtctgggttgtttccctcttcacgacggacgttagcacccgccgtgtgtctcctgtgataacattctccggtattcgcagtttgcatcgggttggtaagtcgggatgacccccttgccgaaacagtgctctacccccggagatgaattcacgaggcgctacctaaatagctttcggggagaaccagctatctcccggtttgattggcctttcacccccagccacaagtcatccgctaatttttcaacattagtcggttcggtcctccagttagtgttacccaaccttcaacctgcccatggctagatcaccgggtttcgggtctataccctgcaacttaacgcccagttaagactcggtttcccttcggctcccctattcggttaaccttgctacagaatataagtcgctgacccattatacaaaaggtacgcagtcacacgcctaagcgtgctcccactgcttgtacgtacacggtttcaggttctttttcactcccctcgccggggttcttttcgcctttccctcacggtactggttcactatcggtcagtcaggagtatttagccttggaggatggtccccccatattcagacaggataccacgtgtcccgccctactcatcgagctcacaatatgtgcatttttgtgtacggggctgtcaccctgtatcgcgcgcctttccagacgcttccactaacacacacactgattcaggctctgggctgctccccgttcgctcgccgctactgggggaatctcggttgatttcttttcctcggggtacttagatgtttcagttcccccggttcgcctcattaacctatggattcagttaatgatagtgtgacgaatcacactgggtttccccattcggaaatcgccggttataacggttcatatcaccttaccgacgcttatcgcagattagcacgtccttcatcgcctctgactgccagggcatccaccgtgtacgcttagtcgcttaacctcacaacccgaagatgtttcttgcgattcatcatcgtgttgcgaaaatttgagagactcacgaacaactttcattgttcagtgtttcaattttcagcttgatccagatttttaaagagcaaaacttcgcagtgaacctttgcaggtacactctgaagtattttttatttaatcactacagagatggtggagctatgcgggatcgaaccgcagacctcctgcgtgcaaagcaggcgctctcccagctgagctatagccccataacatgtagttaaaacctcttcaaatttgcgatgcaaatttggtaggcctgagtggacttgaaccaccgacctcacccttatcaggggtgcgctctaaccacctgagctacaagcctgtagaggttttactgctcattttcatcagacaatctgtgtgagcactgcaaagaacgcttctttaaggtaaggaggtgatccaaccgcaggttcccctacggttaccttgttacgacttcaccccagtcatgaatcacaaagtggtaagcgccctcccgaaggttaagctacctacttcttttgcaacccactcccatggtgtgacgggcggtgtgtacaaggcccgggaacgtattcaccgtggcattctgatccacgattactagcgattccgacttcatggagtcgagttgcagactccaatccggactacgacgcactttatgaggtccgcttgctctcgcgaggtcgcttctctttgtatgcgccattgtagcacgtgtgtagccctggtcgtaagggccatgatgacttgacgtcatccccaccttcctccagtttatcactggcagtctcctttgagttcccggccggaccgctggcaacaaaggataagggttgcgctcgttgcgggacttaacccaacatttcacaacacgagctgacgacagccatgcagcacctgtctcacagttcccgaaggcaccaatccatctctggaaagttctgtggatgtcaagaccaggtaaggttcttcgcgttgcatcgaattaaaccacatgctccaccgcttgtgcgggcccccgtcaattcatttgagttttaaccttgcggccgtactccccaggcggtcgacttaacgcgttagctccggaagccacgcctcaagggcacaacctccaagtcgacatcgtttacggcgtggactaccagggtatctaatcctgtttgctccccacgctttcgcacctgagcgtcagtcttcgtccagggggccgccttcgccaccggtattcctccagatctctacgcatttcaccgctacacctggaattctacccccctctacgagactcaagcttgccagtatcagatgcagttcccaggttgagcccggggatttcacatctgacttaacaaaccgcctgcgtgcgctttacgcccagtaattccgattaacgcttgcaccctccgtattaccgcggctgctggcacggagttagccggtgcttcttctgcgggtaacgtcaatgagcaaaggtattaactttactcccttcctccccgctgaaagtactttacaacccgaaggccttcttcatacacgcggcatggctgcatcaggcttgcgcccattgtgcaatattccccactgctgcctcccgtaggagtctggaccgtgtctcagttccagtgtggctggtcatcctctcagaccagctagggatcgtcgccttggtgagccgttaccccaccaacaagctaatcccatctgggcacatccgatggcaagaggcccgaaggtccccctctttggtcttgcgacattatgcggtattagctaccgtttccagtagttatccccctccatcaggcagtttcccagacattactcacccgtccgccactcgtcagcgaagcagcaagctgcttcctgttaccgttcgacttgcatgtgttaggcctgccgccagcgttcaatctgagccatgatcaaactcttcaatttaaaagtttgatgctcaaagaattaaacttcgtaatgaattacgtgttcactcttgagacttggtattcatttttcgtcttgcgacgttaagaatccgtatcttcgagtgcccacacagattgtctgataaattgttaaagagcagttgcgacgcggctttcagctcactgtcgcgaggtggcgtatattacgctttcctctttcagagtcaaccctgaatttcagaattttttctcttcgttgttccgaccatcctgtgaagtgtttcacgttgtcgtctcaacggaggcgcattatagggatcccaattttttgcacaagtacttttttgatctttttttctgtttgttgttttttcaccctttttgctgcattcgcacacaaaacggtgcttttttgcatactaaaagacttgcacaaggctaataatgcacccaaagtcattaggaaatcatttattgttgaggtgagtatgtctgatgttttacgcccataccgcgatctttttccacaaatcggccagcgcgtaatgatcgacgatagcagcgtcgtgattggtgacgttcgtctggctgatgatgtggggatctggccgctcgttgtgattcgtggagatgtacattatgtacagatcggagcacgcaccaatatccaggatggcagtatgttgcatgtcactcataaatcctcgtacaacccagatggcaacccattaaccattggcgaagatgtcactgttggtcacaaggtgatgctccacggctgcaccattggcaatcgagttttggttgggatgggctcaattttacttgatggcgcaatagtagaagatgatgtgatgattggtgcgggtagcctggtcccacaaaataaacggctggagagcggatatctgtatctcggtagtcccgtcaaacagatccgcccgttaagtgatgaagagaaggctgggttacgctattccgcaaataactacgtgaaatggaaggacgaatatctggatcaaggtaaccagacccaaccttgatcatcttcactttgttcctgaattaagttttccgcttcttcttccaggtcccagcgatgctgacgaaaactcgctaaccactgttctggcgtacctccagtaaagcgatacgccagactctcgccagagatcgcacatgtcagttgcataccattcacgagagcaggaaaacatacacatcttttattctcgtcccactcttccctatccggaaactggatggcctgattcacgctgacaattcctgttgcaatagtttgatgaccggttctacatcaggcagaacgccatgccaaagaaggaaggcatgagccgcctgtgccaccagcattcctaaaccatcagcattacgctttgagcctcgctgctcacaccatgccagaaaaggagtttttcctttctgatagaacatgtcatagcaataaatgcctggatgaatgagcgatgacgggatcgccggaatatcaccactgatgccactggatgttgcattaataatgagatcaaactcatgaccttccagttcgtccatacccaacgcctgaatactgccagtgtgcgcaaacaatttagccaactcttccgcgcgggataccgtccgattagtgattgtcaccgcacagtctagggaaagaagtggcagtagtacgccgcgagatgctccaccagcgccgataagcagaatacgtaaaccagggcggataaaagacagacgttccagatcgcttaacaagcctacaccatcggtattgtcacccagcaggcgtccatcttctaaccgcttgagggtattaactgcaccagccaacgctgcccgttcagtaagctcatccgctctggcaaaagcctcttctttaaaaggcaccgtcacattcgcacctttaccaccagcacgaaagaaagcgttcagtgtgttgatgaaatcattgatgggtgccaacacgcgcccatagggatgttcaatattcagttgctgagcaaattgctgatgaatgaatggcgatttgctgtgggctatcggattaccaaaaacagcataggtttccattatgttacccctgtcgaaacagttcacccgtcagggcatcgcggatttctgaaggatttaaacgcccccccgtttcaccaggcacaaccgggaacgccgcgccaaattgtgcgcgaacttcgtctactgttcgacaaggtggcaatccactcaagttggcactggtagaaaccagcggtttaccataagcctggcacaaagcaaccaccaacggatggtcggtgactcgtacagcaagcgaatcaaagcggcccgtcaaccagcgcggtgttgtcgcaggcgcgggaaagacaaaggtgacaggacctggccagcgggaaaaaatggtttcacgctgcgcatcagtcagcatggtgtcatcaatatagggtttaagctgctcgtaatttgccgcgattaaaatcagccccttatcaaccggacgctgttttaactccaacagtctcatcactgctgtttcgctatcaggatcgcacccaacaccgaaaacggcttccgttggataggcgatgacacgttcttcattgaggacatctatcgcagctgcgatagcgtctccttgcaggttattattcacgttattattccgccgaaaccggctttccacattgtttactggcacaaaagtgttttacaccctgcgcggttttcttttcgatgagtagcggataatgacactcagggcattctccagctattggtttgaagttaatggcaaattgacactccgggtagcgatcacaggagtgaaatgttttgccataacgggagcggcgctggaccagatggcccgtccgacattgggggcatgtaattgctgtttcgtccggtttatcgataagttcggtatgttcgcattcagggtagttactgcaaccaataaacataccaaagcgtccctggcgtaataccagatttgcgccacatgcagggcaaacctgcccctccagaactttgacaatatgtccatccgctgaagatttcagaagacggacgtagtcacacgccggatactgtgagcatccaagaaacggaccgtgtttcccggatcgaataaccagttcagccccgcactttgggcaggactcattattacgcaccgtgaacagtgctgattttgccataacaacttatgctgaattaaagaaatgattaatgcagcataccttcattcacttcaaagagtaattcttccatttgctggtacgcattttcgcaccccgggatgttgaacaacaccatcaggatcacccatttcagatcatccagttcgaactctgcgttatccagcgcgagcactcgctctatcaccatttcacgagtttcaaggttgagcacctgaatctgctcaaggaaaagcagaaacccacggcagctggcatccagtcgttcacactcttccggtgtataaatacgcatggagagaggatccgaggccagttgcatcggttctgccaacccttcctgataatcagcaagtttttccagccatagcagggcattgtagatatcttctcgctcaaaacctgcgtcggtaagatcctgttcaagtttgtcttgatccacacgcaactcagcttcagtgtgaatataggtttcaaacaaatacattagtacgtcgaacatggcatgccctcctcaatcggacatagccgccgggtacagctgcgatccatcctgctaactccagttcgagtagttgagtaactacctctggcacaggttggccggcacgttcagcgacgacgtcaacaggtgttacctcatctcctacgttagccaggagctcaggaaatggcaatgccacgtcttgctgatctggtgaataaaatgaattttcaggggcgtctggcaaccagtgcaatccaaattgcaagttttccagaatttcttccggttccgtcacaagaatcgcaccttgttttattaaccagtgaggcccttcgcttcccggattccctattggacctggcaaggcaaaaacttcacgcctctgctcaagcgcacaacgtgctgtcaccagcgaaccactgcgcaaagccgcttccaccaccagtacacctttacttagaccactgataatgcgatttcttcgtgggaaattgtaagcaaggggtggaacatcgaggggaaattccgagacgagagctccgccatgttcaagcagactggcagccagtcgggcatggcggcggggatgaatggtattaagtccattccccaatacagcaatgctgacgccatttacctgtaaggcagctttatgcgccacaccatcgattccacgcgccagtccactcgtaattgtcactccacgcgtcgccagagtttcgcaaaataaccgtccccatcgctcgccataccatgaatgcgcccgactccccactacggcaagctgaaatgaatgcagcgcgtgcagttctccttcaacaaacagtgcgccggggtaatctgtcgtcaccagaagttgaggaggataaaattcgctgtccgcagggattaaatgatggttgggttgctccaaccaacaaagtgagctttcgatactctttcgcggaaatgaaagaaagcgttgtgcctgccgcaatgtaagccctgtttgctgcaatccaaccgcatcaatttgcgactgttttgccagccagtgagctatacggaccatatcatcgccgtacaagctgctgatactcattaaacgcagccaaatttctgtatcgaccatccttatctccctgccataagcagccttagcaatctttgcgattggtcagtgatgctgtcaatcagagggggatttgtctagaatagaagaaataatctttctaacccctgaacacatctctggagatttatgtcagttttgcaagtgttacatattccggacgagcggcttcgcaaagttgctaaaccggtagaagaagtgaatgcagaaatacagcgtatcgtcgatgatatgttcgagacgatgtacgcagaagaaggtattggcctggcggcaacccaggttgatatccatcaacgtatcattgttattgatgtttcggaaaaccgtgacgaacggctggtgttaatcaatccggagcttttagaaaaaagcggcgaaacaggcattgaagaaggttgcctgtcgatccctgaacaacgtgctttagtgccgcgcgcagagaaagttaaaattcgcgcccttgaccgcgacggtaaaccatttgaactggaagcagaggggctgttagccatctgtattcagcatgagatggatcacctggtcggcaaactgtttatggattatctgtcaccgctgaaacaacaacgtattcgtcagaaagttgaaaaactagatcgtctgaaagcccgggcttaaggataagaactaacgtgtcagaatcactacgtattatttttgcgggtacacctgactttgcagcgcgtcatctcgacgcgctgttgtcttctggtcataacgtcgttggcgtgttcacccagccagaccgaccggcaggacgcggtaaaaaactgatgcccagcccggttaaagttctggctgaggaaaaaggtctgcccgtttttcaacctgtttccctgcgtccacaagaaagccagcaactggtcgccgatctgcaggctgatgttatggtcgtcgtcgcctatggcttaattctgcctaaagcagtgctggagatgccgcgtcttggctgtatcaacgttcatggttcactgctgccacgctggcgcggtgctgcaccaatccaacgctcactatgggcgggtgatgcagaaactggtgtgaccattatgcaaatggatgtcggtttagacaccggtgatatgctctataagctctcctgcccgattactgcagaagataccagtggtacgctgtacgacaagctggcagagcttggcccacaagggctaatcaccacgttgaaacaactagcagacggcacggcgaaaccagaagttcaggacgaaactcttgtcacttacgccgagaagttgagtaaagaagaagcgcgtattgactggtcgctttcggcagcgcagcttgaacgctgcattcgcgctttcaacccatggccaatgagctggctggaaattgaaggacaaccggttaaagtctggaaagcgtcggtcattgatacggcaaccaacgctgcaccaggaacgatccttgaagccaacaaacaaggcattcaggttgcgactggtgatggcatcctgaacctgctctcgttacaacctgcgggtaagaaagcgatgagcgcgcaagacctcctgaattctcgtcgggaatggtttgttccgggcaaccgtctggcctgatagtccactcttctaagcccggtcttaccgggcatttttatacttatgaaaaaacaacgtaatttacgtagcatggcggcccaggccgttgaacaagtcgtcgagcaagggcaatcattaagcaacattctgccaccgctccagcaaaaagtttctgataaagacaaagcacttcttcaagagttgtgctttggcgtactgcgtacgctttcgcagttagactggctgattaataagttaatggcccgtccgatgaccggcaaacagcgcactgtgcattacctgattatggttggtttgtatcaactgctttatacccgcattccacctcatgctgcgctggctgaaacggttgaaggcgctatcgcaattaagcgtccgcaacttaaagggttgattaacggtgtattacgccagttccagcatcagcaagaagagttattagccgagtttaataccagtgatgcacgttatctgcatccttcctggttgctgaagcgtctgcaaaaagcgtatccagagcagtggcaatccatcgtcgaagccaataaccagcgtccgccaatgtggctgcgcgttaatcgtacgcatcattcccgcgacagctggcttgcattgttggatgaagcaggaatgaaaggtttcccgcatgcggattaccctgatgctgtacggctggaaacacctgcacctgttcatgcgctacctggttttgaagacggatgggttaccgttcaggatgcatcagcacaaggttgcatgacctggcttgcgccacaaaacggtgaacacattctggatctttgtgccgcccccggcggtaaaacaacgcatatccttgaggtggcaccagaagcgcaggttgttgcggttgatattgacgaacagcgcctctctcgcgttcacgacaatttaaaacgccttggtatgaaggcgaccgtgaaacaaggtgatggccgttacccttcccaatggtgtggcgagcaacagtttgatcgcattttattagatgcgccttgttcagcaacgggggtgattcgtcgccatccggatattaaatggttacgtcgcgatcgcgatatcccggaactcgcgcaattgcagtctgaaattctcgacgccatttggccgcatttaaaatccggtggaaccctggtctatgccacctgttcggtgttaccggaagagaatagcctgcagattaaagcttttttgcaacgtaccgctgatgccgaactttgcgaaacaggaacaccagagcaaccgggtaaacaaaatctgcctggtgccgaagagggcgacggcttcttttacgctaagctaatcaaaaagtgatgagataacgggtcgagactgatgaaaattatcattctgggtgccggccaggttggcggcacactggcggaaaacctggttggcgagaacaacgatattactgttgtcgataccaacggtgagcgtctgcggaccttgcaggataaatttgacctgcgagtcgtgcaggggcatggctctcatccacgcgtattgcgggaggcaggtgccgacgacgccgatatgctggttgctgtaaccagttcagatgaaaccaatatggttgcctgccaggtagcctactcacttttcaacacccctaatcgcatcgctcgcatccgctcaccagactacgtacgcgatgccgataagctatttcattcagatgctgtaccgattgatcatctgatcgcaccagagcagttggttatcgataatatttaccgactgattgagtatccaggcgcattgcaggtggtgaacttcgctgagggtaaagtcagcctcgctgtagttaaagcctattatggcggcccgctgattggtaatgcactttcgaccatgcgcgaacatatgccacatatcgatactcgtgtggcagcaattttccgccacgatcgccccattcgtccacaaggttcgaccattgttgaagctggtgatgaagtgttctttattgccgcttcacagcatatccgcgcggtgatgagtgaattacagcgactggaaaaaccgtataagcggatcatgctggttggtggcggtaatatcggtgcagggctggcgcgtcgtctggaaaaagattacagcgttaaactcatcgaacgtaatcagcagcgcgctgccgaactggcggaaaagttgcagaatacgatcgtcttttttggtgatgcgtcggatcaagaactgctggccgaagaacatatcgatcaagttgatctgtttattgccgtcaccaacgatgacgaggccaatatcatgtccgccatgcttgccaaacgtatgggtgcgaaaaaggtgatggtattgatccagcgtcgcgcttatgtggatctggttcaggggagcgtgatcgatattgcaatttcaccacaacaagcaactatttctgcgttgcttagccatgtgcgaaaagcagatattgttggtgtttcctcattgcgccgcggcgtagcagaagctattgaagccgttgctcacggtgatgaaagcacctcacgcgttgtcggcagagtcattgacgaaatcaagctaccgccaggaacgattattggagcggtggtacgtggaaacgacgtgatgattgccaatgacaatctgcgcattgagcaaggcgatcacgtaattatgttcctcacagataaaaagtttattaccgacgtcgaaagactcttccagccaagccctttcttcttgtaattaataaggcgtctaatgacgccttattatttccctttgattatcaaggattaattaaattcattcctggcaggaaaatggcttaacatttgttagacttatggttgtcggcttcatagggagaataacatgagcattattaaagaatttcgcgaatttgcgatgcgcgggaacgtggtggatttggcggtgggtgtcattatcggtgcggcattcgggaagattgtatcttcactggttgccgatatcatcatgccacctctgggcttattaattggcgggatcgactttaaacagtttgctgtcacgctacgcgatgcgcagggggatatccctgctgttgtgatgcattacggtgtcttcattcaaaacgtctttgattttctgattgtggcctttgccatctttatggcgattaagctaatcaacaaactgaatcggaaaaaagaagaaccagctgccgcacctgcaccaactaaagaagaagtattactggcagaaattcgtgatttgctgaaagagcagaataaccgctcttaacaagcgcctgaaagcagaagaccagtggtaaaaaagtgatttactttcttgccactggcctcccagttcccccgattgccatgttttccttttcgcatgtaactgcctttccctttcttatttttctctactcgctgtcggaataagggatcatgtagtaatgcttctatcgcattatcctttatctgccctttagtatgctgatatcggctcataaaaactccagttggttatttaacggcgcgagtgtaatcctgtcagtgcaaaaaatcaacagccactcttaacgccactcgccccttgttcaagagcttcaagaatcgagcaataaacactgctatgggcggtcccacaacaggcatcgttaaggcgttgcaaggaacgctgcatactctgcaactcggctatccgtgcttcgacttcctgcaatctttcctgcacaatgccttttgactcctgacaggtatggtgttcaggatcgatgcggatcgacagcaactcgcggatcgactccagactgaaacctagttgtctggcatggcggataaatttcaatcgctggagatcgctttcggtatacaggcgaaacccgccttcagtacgcacttcatgctccatcatctgctgtttttcgtaataacgaatcgtgtcaggtgttacttccgccatttttgccagctcaccaatgcgatacatacatactccactagttatcgttgattttgtccaacaacttgtcagcataatcgccgcgtaaaaaatcggtactcaatccagcttgtcgcagcttcaattccagtaatgacaatcgacggctaacctcttgatattgcggatcatcgtgacggatacctttgagaatatccagaagctgaattgcttctctccgttgctcaagttctggcggtaagcaaccggcattcttcagcaagcgataccccgcacgtaattccggtggcacgtgagaatcatcatccagtatcaatggttcgccgctacctgccaggttatcaaactcacctttcgcttgcgcttctgctatatggcgctctgcccactggtcaagtaaccacataaatactccaggggatgaacaaaaagagtacagctattgtagataagtggggatactacgggtataaaaaaacccgccggggcgggtttttttacattgcttcagattactctgcagcagcttctgctttctctgaacgatcaaccagctcgatgtaagccatcggcgcgttgtcgcctgcacggaagccacacttcagaatacgagtgtaaccaccggcacggctcgcgaaacgcgggcccagttcgttaaacagttttgccacgatctcgttatcacgagtacgggcgaatgccagacgacgattagcaacgctatcagtcttggcaagagtaatcagcggctcaactacgcggcgcagctctttcgctttaggcagagtcgtcttgatgatttcatgacgaaccagtgaacctgccatattgcggaacatagcctggcgatggctgctgttgcggttcagttgacgaccactcttacgatggcgcatgaccttatccttctcagtaaaaccttaacctgtgatccggttactcgtcagcgatgcttgccggtggccagttttccaggcgcatgcccagagacagtccacgggaagccagcacgtctttaatctcagtaagagattttttaccaaggttaggcgttttaaggagctcaacctcggtacgctgtaccagatcaccgatatagtggatagcttctgctttaaggcagttagcagagcggacagtcaattccagatcgtcaacagggcgcagcaggatcggatcgaactctggtttctcttctttcacttcaggctgacgtacatcacgtaagtcaacgaaagcttccagttgttcagccagaatggttgccgcacgacgaatcgcctcttcaggatcgattgtgccgttggtttccatttcgatgaccagcttgtccaggtcggtacgctgttctacacgcgctgcttcaacattgtaggcaatacgctccacagggctgtagcatgcgtcgaccagcagacggccgattgggcgctcatcttcttccgaatgaattcgggtagaagccggcacataaccacgaccgcgctgaactttgatacgcatgctaatagacgcgttctcatcggtcaggtggcagatcacgtgctgcggcttgacgatttcgacatcaccgtcgtgggtgatatcggctgcagtcacagggccaatgccagatttattcaaggtaagaataacttcatctttgccctgaactctcaccgccagccctttcaggttgagcaggatttccaggatatcttcctgaacgccttctttggtgctgtactcatgtagtacaccatcaatctcaacctcggtcaccgcgcaacccggcatcgatgagagcagaatacggcgcagtgcgttacccagagtatggccaaagccacgctctaaaggctcaagggtcaccttggcgtgcgtcgaactcacttgctcgatatcaaccaggcgcggttttagaaactctgtcacagaaccctgcattgtgtcctctctttggtactaagctttacttggagtaaagctcgacgatcaggtgttcgttaatgtccgcagacagatcagaacgctccggcttacgcttaaacgtaccttccatcttgccagcatcaacttccagccaggttggcttttcacgctgctcagccagctccagagcggctttcacgcgagactgcttcttcgctttctcacgaatgcttacaacgtcattcggactaacctgataagaagcgatgttaacaacacgaccgtttaccataattgctttatggctaaccagctgacgtgcttctgcacgagtggcaccgaagcccatacggtatacaacgttgtccagacgaccttccagcagagccaacaggttttcaccggtgttgcctttcagacgtgctgcttctttgtagtagttacggaactgacgctccagcacaccatagatacggcgaactttttgcttttcacgcaactgcacaccatagtcagacagacgcggtttacgcgcaccgtgctggccaggagcttgttcaattttacacttggtatcgatcgcgcgaacgccagacttaaggaataagtcggtgccctcacgacggctcagcttgagcttaggacccaaatatcttgccattttctttctccaacaaacctggaaaacgaggcgttatacgcgacgttttttcggcggacgacaaccgttatgagggatcggagtcacatcagtaatgttagtgatgcggaaacctgcggcgttcagagcacgaatagtagattcgcggcctggacccggacctttaaccataacttccagattcttgatgccgtattctttcacggcgtcagcgcaacgctctgctgcaacctgagctgcaaacggagtggatttgcgagaaccacggaaaccggaaccaccggctgttgcccaacccaacgcgttaccctgacgatcagtgatagtcacgatggtgttgttgaaagaagcatggatatgagccacgccgtcagagacttgttttcttacacgtttacgtgcacgaattggtgcctttgccattattcaatcaccccgattatttcttgatcggtttgcgcggacccttacgggtacgtgcgttggtcttggtacgctgaccgcgaaccgggagaccacgacgatgacgcaaaccgcgatagcaaccaagatccatcaggcgcttgatgctcatgctgatttcacggcgcagatcaccttcaacgacaaatttggcaacttcgtcacgcagcgtgtcgatttgtccttcagacagctcactgatcttaacatcttcagcgatacccgctgcagccaggatggctttagaacgggtcttgccgacgccataaatcgaagttaatgcgattacggcatgcttatgatcaggaatgttaatgcctgctatacgggccactatgcactcctactatttaatatgtacgttccatgctgaaaagcccgttttcaggatactcaaatggaaacgcacagacatacaaaagattggctggctaatctagccagctcaacccaactttgcaagaaaaatatgcgaaaaaatcagccttggcgctgtttatgcttcggctcggcactgcaaatcacacggatgacaccatcacgcttaacgattttgcagttacggcataatttcttgacggaagcacgaactttcatttttactctccgtaacttctcgggcgaccaattatcggccgtagcctttcaggttcgccttcttcaatgcagactcatactgactggacatcatcagagtttgcacttgagccataaagtccataatcacgacaacaacgataagcagtgaggtcccaccgaagtagaacggtactttcattgcatcacgcatgaactccgggatcaggcagataaaggtaatatacagcgcaccaaccagggtcaggcgggtcattactttatcgatatacttcgccgtttgctctcccggacgaattcctggtacaaatgcaccggacttcttcaggttatctgctgtttcacgcgggttgaaaaccaacgccgtgtagaagaaacagaagaagatgattgcagacgcatagagtaacacataaagcggttgcccaggctgcaaatacagcgaaattgttgtcagccagttccaaccagtaccgcccccgaaccatgacgcgatggtcgccgggaacagaataatactggaagcgaagattgccgggattacccccgccatattcactttcagcggtaaatgtgtgctctgtgcagcataaacacgacgaccttgctgacgtttcgcgtagtttaccacaatgcggcgttgaccacgctcaacaaatacaacaaagaacgtcactgcaaatactaatactgcaaccaacagcaacacgaggaagtgcaggtcgccttgacgcgcttgctcgatagtatgggcaatggctggcgggagtcccgcgacaataccgacgaagataatgattgaaataccgttgccgatacctcgttcagtaatctgttcgcccaaccacatcaggaacatcgttcctgtgaccagacttacaacagcggtgaagtagaatgcaaagcccgggttaatcaccaggccttgcataccaggcatattcggcagaccagtagcaataccgatcgactggaatattgccagcaccagagtaccgtagcgggtgtactggctgatcttacgacgaccagactccccttctttcttaatttccgccaacgttgggtgaaccaccgtcagcagctggataatgatcgacgccgaaatatacggcatgatccccagagcaaagatagaagcacggctgagagcaccaccagagaacatgttaaacatctcaatgatggtgcctcgctgttgctcaagcagtttggcaagtacagtggcatcaataccagggatcggaataaaagagccaatacggaacacaatcagcgcaccgataacaaacagcagtctgcgtttcagctcgcctaagccacctttggcactttgaaaatctaatcccggttgtttagccatctgctacttattcctcgattttaccgccagcagcttcgatagcagcacgagcgcctttagtaacacgcaggccacgaacagttaccggagtcgttacttcgccagccaggatcactttcgcgaactcgatctggataccgataatgttagccgctttcagcgtgttcaggtctacaacaccgccttctactttagccaggtcagacagacgaacttcggctgtaatcgctgctttacgagaagtgaagccgaatttcggcagacgacggtacagaggcatctgaccaccctcgaaaccgcgacgtacgccaccgccagaacgagacttctgacctttgtgaccacgaccaccggttttaccgaggccagaaccgataccacgacccaggcgtttacccgcctttttggagccttcggccggagacagagtatttaaacgcatctcttactcctcaactttaaccatgaaggaaaccgcgttgatcataccgcgaatagcaggagtatcctcgcgctctacggtgtgaccaatacgacgcagacccaggccaagcagcgttgccttgtgtttcggcagacgaccgattgcactgcgggtttgagtaattttaatagtctttgccatggtttatttccccagaatttcttcaacggatttaccacgcttggcagcgaccatttctggagaattcatattttccaggccatcaatagttgcacgaaccacgttgatcgggttggtggaaccatatgctttagccagaacgttatgaaccccagcgacttccagaacggcgcgcattgcaccaccggcgatgataccggtaccttcggaagccggctgcatgaatacgcgagaacccgtgtgaacacctttaacagggtgttgcagagtgccgttattcagcgcgacgttaatcatattgcgacgggctttttccatcgctttctggatcgctgctggaacttcacgcgctttaccgtaaccaaaaccaacgcgaccgttaccatcgccaactacagtcagagctgtgaaggagaaaatacgaccacctttaacggttttagatacgcggtttaccgcgatcagcttttcctgcagttcgccagcttgtttttcgatgtgagccatcttacacctctaccttagaactgaaggccagcttcacgggcagcatctgccagtgcctggacacgaccatgatattggaacccggaacggtcaaaggatacatctttgatgcctttttccagagcgcgttcagcgacagctttacccacagctgcagccgcgtctttgttaccggtgtacttcagttgttcagcgatagctttttctacagtagaagcagctaccagaacttcagaaccgttcggtgcaattacctgtgcgtaaatgtgacgcggggtacgatgtaccaccaggcgagttgcgcccagctcctggagcttgcggcgtgcgcgggtcgcacgacggatacgagcaaatttcttatccatagtgttaccttacttcttcttagcctctttggtacgcacgacttcgtcggcgtaacgaacacccttgcctttataaggctcaggacgacggtaggcgcgcagatccgctgcaacctggccgatcacctgcttatcaacgcctttcagcacgatttcagtctgagtcggacattcagcagtgatacccgcaggcagctgatggtcaacaggatgagagaaacccagagacaggttaatcacattgcctttaaccgctgcacggtaacctacaccaaccagctgcagcttcttagtgaagccttcggtaacaccgataaccattgagttcagcagggcacgcgcggtaccagcctgtgcccaaccgtctgcgtaaccatcacgcggaccgaaggtcagggtattatctgcatgtttaacttcaacagcatcgttgagagtacgagtcagctcgccgtttttacctttgatcgtaataacctgaccgttgatttttacgtcaacgccggcaggaacaacgaccggtgctttagcaacacgagacattttttcctccgattaggctacgtagcagataatttcgccaccaagaccagcctggcgcgctgcacgatcagtcataacacctttagaggtagaaacaactgcgatacccagacccgccataactttcggcagctcatctttacgtttatagatgcgcagacctgggcggctgacacgctgaatgctttctacaacagctttgccctggaaatacttcagagtaagttccagttcaggcttggtgtcgccttcaactttaaaatcttcaataaaaccttcttccttcagcacgttggcgattgccactttcagcttggaggaaggcatggtgaccgcagctttgttcgcggcctgaccgttacggatacgggtcagcatatccgcgatcggatcttgcatgctcatctgtctttactcccgtgattcaattggtgacaattaccagctagcctttttcagacccgggatttcaccgcgcatagcggcttcacggaccttaatacggctcaacccgaacttccgcaggaaaccatgcgggcgacctgtttgacggcagcggttacgctgacgagacgggctggaatcacgcggcagagtctgcagcttgagaacagcgttccaacgatcttcgtcggaagcgttcacatcagagatgatcgctttcagttcagcgcgtttcgcgaagtatttatcagctaaagctacgcgttttacttcgcgtgctttcattgattgcttagccatttagtaaccctaccttacttgcggaacgggaagtcaaaggcagccagcagagcgcggccttcttcgtcagatttcgcagtagtggtaatggtaatatccaaaccacgaacgcggtcgactttatcgtagtcgatttctgggaagatgatctgctcacggacacccatgctgtagttaccacgaccgtcgaaagacttagcggacaggccacggaagtcacgaatacgaggtacagcaatagtgatcaggcgctcaaagaactcccacatgcgttcgccacgcagagttactttacagccgatcggatagccctgacggattttgaagcctgcaacagatttgcgtgctttggtgatcagcggtttttgaccggagattgctgccaggtctgctgctgcgttatccagcagttttttgtcagcgatcgcttcaccaacacccatgttcagggtgatcttctcgacccgagggacttgcatgacagaattgtagttaaactcagtcatgagttttttaactacttcgtctttgtagtaatcatgcagtttcgccatcgtactactccaaattacttgatagtttcgctgttagacttgaagaaacggacttttttgccgtcttcgaatctaaagcctacacggtcagccttgccggttgccgcattgaagattgctacgttggaaacctgaatagcggcttctttttcaacgatgccacccggttggttcagggccggaaccggcttctgatgtttcttaaccaggttgataccttcaacaatgaccttgccggaagacaggacattcttaactttaccgcgtttacctttatctttaccggttaacacgataacttcgtcatcacgacggattttcgctgccatgattcgctccttagagtacttctggtgccagagagataattttcatgaacttctcactacgaagctcacgagttaccggcccaaaaatacgcgtaccgataggctgctcgctgttgttgttcagaagaacacaagcattaccatcgaagcgaatgacagaaccgtccgggcgacgaacacccttcttggtgcgcaccactaccgccttcagcacatcaccttttttgaccttaccacgcggaattgcttctttgatggtgatcttgatgatgtcgcctacgcctgcgtagcgacggtgcgagccacccagaaccttgatacacattacgcgacgtgcaccggagttgtcggcgacgttcagcatagtctgttcttggatcattttagtgctccgctaatgtcaactactactgagacccgaaaatcaggtcgttaaaaatccccatatcgagggcgcggcattataacaccgcttcaaggatatgggtagaaaaaataaacggctcatttctgagccgtttattcgtatcgagagagtgtactgtattacagaaccgctttctctacaacgcgaaccagcgtccaggatttagtcttggacagcggacggcattcgcggatttcaaccacgtcaccgataccgcattcgttgttctcgtcatgtacgtgcagtttggtcgtacgcttgatgaatttaccgtagatcgggtgtttcacaaaacgttcgatagcaacaacaatggatttctccattttgtcgctaacaacgcgaccttgcagagtacggattttatcggtcattacgcacccgccttctcgttcagtaaagtcttaacgcgtgcgacatcgcgacgcacttgcttcaacaggtgagactgttgcagctggccacttgcagcctgcatacgcaggttgaactgctcacgcagcaggttcagcagctcggtgttcagctcttcaacgctcttctcacgcagctcttttgctttcattacatcaccgtcttagttacaaaggtggttttaatcggcagtttcgctgctgccagcttgaatgcttcacgggccagctcttccggaacaccgtccatttcatacaggactttacccggctgaatcaaggcaacccaatactccacgttacctttacctttacccatacgcactgccagcggcttttcagtgatcggtttgtccgggaacacacggatccagatcttaccttgacgcttaactgcacgggtcatagcacgacgtgctgcttcgatctgacgggcagtcagacgaccacggccaacagctttcagaccgaagctgccgaagctaacatccgtaccctgcgccagaccgcggttacggcctttgtgcattttacggaattttgtacgctttggttgtaacatcagcgacgctccttatttacggcctttacgctgctgctttttaggctgagcagccggtttttccggttgttcaacagcagccataccacccaggatctcgcctttgaagatccacactttaacgccgattacaccgtaagtggtgtgcgcttcagaggtgttgtagtcgatgtcagcacgcagagtgtgcagcggtacgcgaccttcgcggtaccattcggtacgtgcgatttccgcgccgcccagacggccgctaacttcaactttaatacctttagcgcccagacgcattgcgttctgtacagcacgcttcatagcacgacggaacataacgcgacgttccagctgagaagtgatgctgtcagcaaccagttttgcgtccagttcaggcttacgaacttcggcgatgttgatctgtgcaggaacgccagcgatgtccgctacgaccttacgcagtttttctacgtcttcaccttttttaccgataacgatacccgggcgagcagtgtgaatggttacacggatgctcttagccggacgctcgataacgatacgagatacggacgctttagccagttccttagtcaggtactgacgtactttaaaatcgctgtccaggttgtcagcgaattctttggtgttcgcaaaccaggtagagttccatggctttacaatacccaagcgaataccattaggatgtactttctgacccattgctagtctccagagtctcagcgatcggacacaaccacagtgatgtggctggtgcgcttcaggatgcgatctgcacgaccttttgcacgcggcataatgcgcttcatgctcgggccttcgtctacgaaaattttcgtaactttcagatcgtcaatgtcagcgccatcgttgtgttcagcgttagcaatggcagattccagaactttcttgaccagtacagccgctttcttgttggtgtaggtcaaaatatccagagcctgcgacactttcttaccgcgaatcaggtcagcaacaaggcgaaccttctgagcagaagaacgagcatggcgatgtttagcgatagtttccatctcttcctcctaccttatttcttcttcgcttttttatcagcagcgtggccgcgataagtacgagtcggtgcgaattcacccagtttgtgaccgaccatttcgtcggtcacaaataccggaacgtgctgacgaccattatggacagcgatggtcaaaccgatcatgttaggaaagatcgttgaacgacgggaccaagtgcgcaggggcttcttgtctccgctttccaccgctttctctaccttcttcagcaagtgcaggtcaataaaaggacctttcttgagagaacgtggcatggcttatcctctaaaattatttgctacggcgacgtacgatgaatttatcagtacgcttgttgctgcgggtcttcttacctttggtctgaacgccccacggagttaccgggtgcttaccaaagttacgaccttcaccaccaccatgtgggtggtctaccgggttcatcgcggtaccgcgaacggtcggacgaacaccacgccagcgtgcagcacctgctttacccagaacgcgcagcatatgctcagcattgccaacttcgcccagagttgcacggcagtctgcttctactttacgcatttcaccagaacgcagacgcagggtgacataagcaccatcacgagcaacgatctgaacgtaagtaccagcggaacgtgccagctgaccgcctttacctggtttcatttctacgttatgaacagtagaaccaaccgggatgttgcgcatcggcagggtgttacctggtttgattgcagcatcaacgccagactgaatctggtcgccagctttcaggcctttaggggccaggatgtaacggcgttcaccgtctttgtacagaaccagcgcgatgttcgcggaacggttcggatcgtactcaagacgttcaacaactgccgggataccgtctttgttgcgtttgaagtcaacaatacggtaagcctgcttgtggccaccaccgatatgacgagtggtgatacggccattgttgttacgaccaccggatttgctgtttttttccagcaacggagcaaaaggtttgcccttgtgcagctcagggttaaccactttaactacgtggcgacgacccggagatgtcggtttacatttaacaactgccattgtattactcctccgacttactcagcgccgccaacgaagtccagattctggccttctttcagggtgacgtaagcttttttccagtcgctacgacgaccgatacgctgtccgtgacgtttaactttccctttaactaccagggtgttaacgacttcgacttcgacttcaaacagtttctgcacagcagctttgatttctgctttggtcgcgtctttagcaactttgagtacgatggtgttggatttttccatcgcagtagacgctttttcagaaacgtgcggtgcacgcagcaccttcagcagacgttcttcacgaatcatgccagcatctcctcaacttgcttaacagcatcagcagtcattacgactttgtcgaaggcgatcaggctaaccgggtcgataccagttgcatcgcgtacgtcaaccttgtgcaggttgcgcgcagccaggaacaggttttcgtccagctcaccggtgatgatcagcacatcttccagagccatgtctttcagtttctgtgccagcagcttagttttcggcgcttctacagagaacttctcgacaacgatcagacgatcctgacgtaccagttcggacaggatgcttttcagcgcgccgcggtacatcttcttgttaactttttgactgtggtcctgcggacgagcagcaaaggtcacgccaccagaacgccagatcgggctcttgatagaaccagaacgcgcacggccggtgcctttctggcgccacggttttttaccggaaccagttacttcagcacgagtcttctgagcacgagtaccctgacgagcaccagctgcataagcaacaacaacctggtgaaccagcgcttcgttgaaatcacgaccgaaggtagtttcggaaacagtcagcgcgctctgcgcgtctttcaatactaattccattgctatctccttacgccttcacagctggtttaacgatcaggtcgctaccggttgcacccgggacagcacctttaaccagcagcaggttgcgctcagcgtcaacgcgtactacgtcaaggctctgaacggttacacgttcgttacccatctgacctgccattttcttgcctttgaacactttgcccggagtctggttctgaccgatagaacccggaacgcggtgagacaaggagttaccgtgagtagcgtcctgggtacggaagttccagcgcttaacggtacctgcgaaacctttacctttagaggtgccagttacgtcaacttttttaacctcagcaaacagttcaacgctaatgctctgacctacagtgaactcttcgccttcagccaggcggaattcccacagaccacggccagcttctacgccagctttagcgaagtggccagcttcaggcttggtcacacggttagcttttttagcaccggtggtcacctgaatagcacggtagccatcgttagccaggtctttaacctgagtaacgcggtttgcttcaacttcgattacggttactgggatagaaacgccgtcttctgtgaagatacgggtcatacccacttttttaccgactaaaccaatcattgtttcaacctctcaatcgctcaatgacctgattaacccaggctgatctgcacgtctacaccggcagccagatccagacgcatcagagcatcaacggttttctcggttggctcaacgatgtcaaccagacgcaagtgagtacggatttcgtactgatcgcgcgcgtctttgttgacgtgcggggagatcagaacagtgaagcgctctttgcgtgtcggcagcgggatcggaccacggacctgcgcaccagtgcgcttggcagtctcgacgatttccgcggttgcttgatcgatcagacgatgatcaaacgctttcaggcggatacggattctttggttctgcatgagaccagagctccaattattttataaacgaaaatgattactcctcagacccattacgattgatgggagagtgtaaccgttcttacgtagctccccgattgggagcattgttaggtagccaaattcggctaactgaggttcagattgaacctgctgtcaactacgacaagcccgcgcattatacatacttaaccaccgaacgcaagcgtattgctagtaaagtaaacagccttcgggttatctctcaagttcgttcagcgcatttttgacacgctctcttaaaccggctttctcgtcgctttcttttacagtattttcttcgtcttcagaagaagagggagcattctcaaccgcgacgtctgggtcatcttcctcctcgacggattcgacgacggggagtggctgttttttgaagaaatagtgttgtgttgattgtttaaaagcgggcgtttcagcctctacagtgacttctgcttttactatccaaagcgcccattaaagaagcattgtcaacgccacgatgtttgaccgttatttgccattttcatgcccgctaaatactttcgttactgatgctgtccgctttccaccatttcatcatcactgattggcgttgtgtttttggtcagcactccagctttacgtttctcttttaaccggtaactctctcctttgatattcagcgtggttgagtgatgtagcagccgatccaggatcgctgttgccagtacgtgatctccgaacatttctccccagtctgcgaaccctttgtttgacgtcagtatgatgctcgctttttcatatcgacggttcagtagccggaagaacagactggcttcctctctgttcatcggcagatagcctatttcatccaggatcaacacccgggcataactcagttgctgtagctgacgctccagccggttttcctgtttcgctttcatcagtgtcgcgatcagtctgtccagtggcataaacagtacccgatgtcccgcatccaccgctttcacgccaagagctatggccagatgagtttttccgacaccaggagggcccagcaggatcacgttttcgctgcgctccacgaacgccagaccagccagttcccggacaaccttacggtcgatgcccggctggaaggtaaagtcgaactgctccagcgttttgacccacggcagacgagcctgcttcagcctggactccataccgcgctgatgcctgccgttccattcctgctgtagcgccatgcacaggaactcccggtagttcagctcttttttagctgcctgttccagcaggctttcaacgtgataactcagatgctccattttcaggcgactcagcaggacttccagttcatgcatcacaacagctcctcataggcactcagtggtcgatgttccacctgactgacctgctgccagagcggggcgtgatgctccggcactgtctgccagccagacgatgctgaacagaggcgatgtgaggccaccagtttctcattactgtagatccgcaactcgtcatccagcgatattcgtatcgataccggctgaccacacagcgcttcgggaacgctgtaacgattaccaccaacctcgatatagctgtcccaggacacatggcggatatcgaagtaactggtatcgaagtctgtatccggtaacggctgcagatgttcctgctccagcgcgaagcgctgttccggcgtttctttgaactggcgaagctcccgtttgtcagccacatcggctatccattgctccagttgttgattgacatgagtgaagctgtcgaacctgcggtaccggacgaagaagttctccttgaggtatttcaccatccgctcaaccttaccttttgttctggccctgcgtggacggcatgcccgtggcaggaagttatagtggtcagccagcaacaggaatccggagttgaacacgactttcccgttgttattcttcagcaccgcagccttctggttatcaaccagcaccgttttcacacaaccaccgaagtagcggaaggcgcgaaccagtgattcgtaggtatgctcagcatcctgttttggtgcggcgaagacatggaagctgcgggagaaccccagcgtattaaccgcaaagttaactttgcaccgttgcccggcaacctccacctcaacttcgccccagtcatgctggagctggtatccaggctgagtttcgaagcgaactgttctttttgacggacgcattttacgtttgggctggatgtagtaacgcagcatggaacgtccgcccgtataacccattgccttaatctccgcgaagataacctcgctattccagacattctctgccaggcgcatgtcgatgtaatccataaacggtttcagcttaaccattttgtggcgggtctttctggctggcggttcagggtatttgaggtagcgtctgaccgtccgttcagagcaaccaatctgagtcgcaatatcgacgatgtacgcgccctgctggcgcatttgctttatcatgtaaaagtcctctctgctcagcatgttgatgtcctttctggtgtgagaaccttaaggaaacaacatgttgggtggagcggacaatccaaatggcgaattaccgtcttatatcactggcgctgacaaccacaggtaatagcgataatggttccactcattaccacggcaagctgcattttccgggggcggttatcacccaatatgcggtaaatcattcgccattgttttgcagtgaaaacgctggtctgctcggcttgctgtaataagcgaattgtttcgccggcaagcgccagctttctgcgatcgccccgacataataaagctatccgtttcagaactctggaggttaaaaggagatcgggttggtcaatattctgaccttcaaggatgcttgccttaagttcgtgctccgtcagacgtcctgtcgagacaagttcaatgccctgttttttaaaatcacgttcgacttttcgatcgggtctgccgatcagcaaaaattgaccgtcaggaataagagatatcgcgcgttggagatcatcaagtatgcggcggtgattcaggtgagcattttcaataataataagagggcagcgactatcagttcgatgaagcgcatgcagtaattgccccgccatctcatctcgcgtccaggcgctgtcacggcagccctgttcagccgcgttatcgtcggtaacgatccatgcggccttaccttgccaggaaacaacgaggcttaaagtaatcacacggcgatgtttatctttttgcagttgctgcgccagccaggtttttccacttccagcctcacccaacaaatagcacagacgccaggtctgacgtttctcacgcaaccaggaaagaataacttctcttctcgtagacatagaacttcctgttttaattattgattatccttaatcataaaaataatgtatgtatttattaattaaatacatattactaatataaataaattttgcttgattcatgcaagcggcattaatactatttatactaacgtcaatatacaacccacccaatctattttattagaacatacatcgtgcccacactacgtttccccttccatctggcgaatcataataaagatgctgccggtgatgctgccaacttactgatttagtgtatgatggtgtttttgaggtgctccagtggcttctgtttctatcagctgtccctcctgttcagctactgacggggtggtgcgtaacggcaaaagcactgccggacatcagcgctatctctgctctcactgccgtaaaacatggcaaatgcagttcacttacaccgcttctcaacccggtacgcaccagaaaatcattgatatggccatgaatggcgttggatgccgggcaactgcacgcattatgggcgttggcctcaacacgattttacgtcacttaaaaaactcaggccgcagtcggtaacctcgcgcatacagccgggcagtgacgtcatcgtctgcgcggaaatggacgaacagtggggctatgtcggggctaaatcgcgccagcgctggctgttttacgcgtatgacagtctccggaagacggttgttgcgcacgtattcggtgaacgcactatggcgacgctggggcgtcttatgagcctgctgtcaccctttgacgtggtgatatggatgacggatggctggccgctgtatgaatcccgcctgaagggaaagctgcacgtaatcagcaagcgatatacgcagcgaattgagcggcataacctgaatctgaggcagcacctggcacggctgggacggaagtcgctgtcgttctcaaaatcggtggagctgcatgacaaagtcatcgggcattatctgaacataaaacactatcaataagttggagtcattaccgcctttcgcatcacccggacagttagaagaggctacccaccaagcatttttatataccgcaccattaaagacgacataccaggtctgaccgccctgctgtttattccaggcaactacagaagaattagacggaacagtgccctgtgctggtgtagccgaaccgccattagccggcgtattggatgcaggcgtatttgaatttgaagaagatgagctgccgctcttttcgcaggaaagtgtattgccaaactgactaatttcagcagctgttgcggtacgctttaaacgccacgggttagttgcatcatttgctttcgcttttcccgggcaatttgtagaaaaaccccaccaggcattttcataaattttgccatcgaaaataacctgatatttattaccaccttgttggttattccatgcttccattgccaatgctggcagagcggaacacaccagccccataccaatcatagatttagtaaatatatttaatttcattataatcccttgtgacgtaaaaactgcaaaacaaaagtcctacgcaggaattatttacgttttacgagaacccttcaatatgaattaaagtgaggcattaaaaataagaaaaaagcctgacaaatgaagaattttaaaaacagaaacattcatatttaaaatattaaattgaattgatattttaaatatgaataatttattcgttctgacagtacgaataagatatgcagtcaacaaatgcaaaaagggcgccgaagcgcccttttcaattcaaaactaattaacgtgtaattagcccagaactttagcaacaacgcccgcgccaacggtacggccgccttcacggattgcgaaacgcagaccgtcgtccatcgcgatcgggtggatcagggtaacaaccattttgatgttgtcgcccggcattaccatctctacgccttccggcagttcgatggtaccagtcacgtcagtagtacggaagtagaactgcggacggtagcctttgaagaacggagtatgacggccgccttcatctttggacagaatgtacacttcagattcgaacttggtgtgcggcttgatggtgcccggcttagccagtacctgaccacgttcgatttcttcacgtttgataccacgcagcagaacacctacgttctcaccagcacggccttcgtccagcagtttgcggaacatttcaacgccagtacaggtagacttctgagtctctttgataccaacgatttcaacttcttcaccaactttgatgataccgcgttctacacgaccggtaacaacggtaccacgaccggagatggagaatacgtcttcgatcggcagcaggaacggcttgtcaatcgcacgctctggttccggaatgtaagaatccaggaagccagccagttccaggattttcgcttcccactctgcgtcgccttccagcgctttcagagcagaaccacgaacgatcggagtgtcgtcgcccgggaagtcgtactgagacagaagttcacgaacttccatttcaaccagttccagcagctcttcgtcatcaaccatgtcgcatttgttcaggaacacgatgatgtacggaacgcctacctgacgacccagcaggatgtgctcacgagtctgcggcatcgggccgtcagtcgcagcaactaccaggatcgcgccgtccatctgagcagcaccggtgatcatgtttttaacatagtcggcgtgccccgggcagtctacgtgtgcgtagtgacgggtcggggtgtcatattcaacgtgagaagtgttgatggtgataccacgagctttttcttccggcgcgttatcgatctggtcgaatgcacgagcagcaccgccgtaggttttagccagtacggtggtgattgcagcggtcagagtagttttaccgtggtcaacgtggccgatagtaccaacgttaacgtgcggttttgtacgttcaaatttttctttagacacggctatattccttactatagtgctctccccttcaggagagagcacgggactttggtattaacccttaggcttatttaccacgggcttcaattacggcctgagcaacgttactcggcgcttcatcatacttcaggaattccatagtgtatgatgcacgacctttggtcagagaacgcagctgagttgcgtatccgaacatttcagacagcggtacttcagcgtggatcttaacgccagtaacttcagattcctgacctttgagcataccacgacgacggctcaagtcaccgataacgtcaccggtgttctcttccggagtttctacttcaaccttcatgatcggctcaagcagaactggtttcgctttcttaaagccttctttaaaggcgatagaagcagccagtttaaacgccagttcagaggagtcaacgtcatggtaagaaccgaagtgcagacgaatacccatgtctactaccgggtagcctgccagcggacctgctttcagctgttcctggatacctttatcaacggccgggatgtattcgccagggattacaccacctttaatgtcgttgatgaactcgtagcctttcgggtttgaacccggctccagcgggtacatgtcgataacaacatgaccatactgaccacgaccaccagactgtttcgcgtgtttaccttcaacatcggtaactttctggcggatagtttcacggtaagcaacctgcggtttacctacgttcgcttcaacgttgaattcacgcttcatacggtcaacgatgatgtcgaggtgcagttcgcccatacccgcgatgatggtctggttagattcttcgtcagtccatacacggaaagacgggtcttctttagccagacggcccagagccagacccattttttcctggtcagctttggttttcggttcaactgcgatggagattaccggctcagggaattccatacgttccagaatgatcggcgcatccgggtcacacagggtgtcaccagtggttacgtctttcagaccgatagcagcagcgatgtcgcccgcgcgaacttctttgatctcttcacgtttgttagcgtgcatctgaacgatacgaccgaaacgctcacgtgcagctttcacggagttcagtacggtatcaccagagttaaccacaccggagtaaacacggaagaaggtcaggttaccaacaaacgggtcggtagcgattttgaacgccagtgcagagaacggctcgtcatcacttgcgtgacgctcagccggagtgtctttaccgtcgtccaggataccgttgatcgcaggtacgtcaaccggggatggcaggtaatcaattaccgcatccagcatcgcctgaacacctttgttcttgaacgcagaaccacaggttaccaggatgatttcgttgttcagaacgcgctgacgcagagcacctttgatttctgcttcagtcagttcttcaccacccaggtatttttccatcagctcttcagaagcttcagctgcggattcgatcaggttctggtgccattcgttagccagttcaaccatgtctgccgggatatcttcgtattcgaaggttacgccctggtcagcgtcgttccagttgatagctttcattttcaccaggtcaacaacaccggtgaaatgttcttcagcaccaatcgccagctgcagcggaaccgggttcgcgcccagacgggttttgatctggttaacaactttcaggaagttcgcacccatgcggtccattttgttaacgaacgcaatgcgcggaactttatatttgtttgcctgacgccatacggtttcagactgcggctgaacaccaccaactgcgcagtaaaccattaccgcaccatcgagaacacgcatggaacgttctacttcgattgtgaagtcaacgtgccccggggtgtcgatgatgttgatgcgatgcggctcatactgcttagccataccagaccagaatgcagtagtcgcagcggaagtgatggtaataccacgttcctgctcctgctccatccagtccatggttgcagcgccgtcatgaacttcaccgattttatggtttacaccggtgtagaacagaatacgttcggtagtagtggttttaccggcgtcgatgtgcgcactgataccgatgttacggtagcgtgcgatgggtgttgtacgagccatttgtttcctcgtttatcttttaggcgttcaatttaagtagcccaaagcgggctgcttactggaagcgcccgcctggtgactaaaactccgaagggattaccaacggtagtgtgcgaacgccttgttggcttcggccatacggtgaacgtcttcacgtttcttaactgcagtacctttgttttctgcagcatcagaaagttcgttcgccaggcgcagagccatggatttatcaccgcgtttacgagcagcttcaacgatccaacgcattgccagagcattacgacgaaccggacggacttcaactggtacctgataagtagaaccaccaacgcggcgagacttaacttctacagtcgggcgcacgttttcgagagctacttcgaatgcttccagttcagatttaccagagcgctgagccagggtctccagcgcgctgtatacgatagattcagcagtagattttttaccatctaccatcaggatatttacaaatttagccagcagttctgatccgaacttcggatccggcagaattttacgctgaccaatgacgcgacgacgtggcatggaaatactccgttgttaattcaggattgtccaaaactctacgagtttagtttgacatttaagttaaaacgtttggccttacttaacggagaaccattaagccttaggacgcttcacgccatacttggaacgagcctgcttacggtctttaacgccggagcagtcaagcgcaccacgtacggtgtggtaacgaacacccgggaggtctttaacacgaccgccacggatcaggatcacggagtgctcctgcaggttgtgaccttcaccaccgatgtaggaagtcacttcgaaaccgttagtcagacgaacacggcatactttacgcagcgcggagttcggttttttaggagtggtagtatatacacgagtacatacgccacgtttttgcgggcatgcttccagcgcaggcacgttgcttttcgcaactttgcgagcacgtggtttgcgtaccagctggttaactgttgccattaaatagctcctggttttagcttttgcttcgtaaacacgtaataaaacgtcctcacacaatatgaggacgccgaattttagggcgatgccgaaaagatgtcaagaaatatacaacgatcccgccatcaccaggccatctggctggagtgcttaaccgtaagtctgacgaaatcagtatagtcaatgggaatgatgtcgttcgaaatttgaccagtcaaaccgcgggcaataaggtcttcgttcagggcatagaccttaatgggggcattacgcagactttcaaggtagcggttaccgtcaactgcggcagttacgccatcttgcaataatagcagttcgtcgccttcactgagcagacgcagcagcgcagcaaaatccgccagccagggtgaacgatgtaatgtgtgcagcataaaagcctcaaaacctcaaaataacatcgtagttggcgagttcgcggcgtaaggcatctgcttcgagcggcgtggcttcgacaacaaagggggtctgcggatctaacccgcgttcgcgcagtgaagccgcacaaacccagcactgttcaatgtcgtacagacccaacaatttaaaagtggcaatgtaatcacgcgccagcactgcatcgggcttttgtcctggcagcagctgaaaaacgccatcagctataaagaagacagccagatcatcagttaatgcggaagttgccagtaaagcatctaaaccttcccgaccagcagctgtaccatgaggcgcagtagaaaaaacaaacgcaattcgtttcatcagaactgtaccaccctgtcacaggtcagcgaggcttccgccagcgcgccaagtccgcttaaggtaaatcccggctgaaggtttgacgaggccagccccagccttccggcctccgtttcatcaacaacgccacggcgtaatgctgccgctacgcagatattcagcgccacaccatgttgcgcattcaactgttgccagccgcgcacaaggtcaaattcgtcgcttgccggtgaggtcaattggttagcgttatagaccccttcccgataaaaaaagacgctgcttaactcatggccttctactatcagcgcctgcgcaaactgaaaagcactactcgcctgttgcgtaccgtatgctggcccggtcaccacgatggcaaaacgcattacttatcttgcccctggaaatcaccgcttttgaactggcggatgtagagatagacagtgtgtttggagatgttcaggcggtcagcaacctggttgatcgcgtctttaatatcgaagatccctttctcgtagagattcagcacgatctgacgatttttggcgttattagaaacattgcgatcggcatttacttcttcgatggtgaactccagcgtttgggtaaccagatcttcaacagaagaggcaaagttgacgcttgaaccgacatccggggtttctggcggcacaaaagtgctcataatctgcgagaagggaacatcaagattcatattgatgcacagcagaccaattacacgctgttcgcggttacgaatcgcgatagtcagggacttcattaatacgccgcttttggcgcgagtaaagtagcatttagaaacgctgctatccgctcccgtcatatcgtgcagcatacgtagcgccaggtcagtaattggcgaaccaatcttccggcctgtatgttcaccgttagcaatgcgaatggctgaacattttagatcctgcaaagagtgcaaaacgatttcacagtgggagccaataagcatcgctaacccgtccaccaccgcttcgtaggatttcagaatatcaaaatcggtctggtcgaaaggacgttgatccagtaaatccaactcactggtttcgttggttaaaagcgacctggacatgaaaaaaaacactccttttcaggagcctgtcgttaacttttcagggcaggctcattaatgatgcgggtaactaaattaatacagcggaggttccgctttccagcactaattatatccggcctgtaataaaaaaaccgccgcctggtcaggcggcggttcttaatgcttattttttagcagaatctgcggctttcgcatcagcttccggctttgcatcagccttcggcgctggtttcacatccagcagctctacgtcaaacaccagggtagaattcggtgggatccccggaacacccgctttgccgtaagccagttctggtggaataaccagtttgatcttaccgcctttcttgatgttcttcagaccttctgtccaccccgggataacaccgtccagacggaaagagagcggttcaccacgggtgtaagagttgtcgaactctttaccgtcgatcagcgtacctttgtagttcactacaacagtatcgctgtctttcggtgcttcgcctttaccggcttctactacctgataaaccagaccagttgaagaggttttcacacctttctctttggcaaatttctcgcggtactctttaccttttgcttcgttatcagccgcgtctttttccatcttcgcctgagcagaagacttcacgcgagcttcgaatgcttgcagagtctgttcgatctcttggtcggagagtttgctcttatcagcaaatgcatcctgaacaccagcgatcagctgatctttatccagtttgatgcccagtttttcttgttctttaagagagttttccatgtaacgacccagcgaagcacccagtgcataagctgatttctgatcgtcatttttgaacgctgctttgctgtcagcagttgtagcaggttttgcagcttcagcagcaaaagtgattggtgcatgcagggcaacggccattgtggtcgccagcagcgttactttaaacagtgatttcatccatatctccaggatcggggcatctcaccccagggttaactattatcagaagggtactataaagcgttgtcgaacaaatctacatacagacacgccctattatcatctattttcagactctttttgtttaaattagtttcgatgaccgcgaaatgagtgctgtctcgggcagcaaagttaagtagaatccgcggcgaccattcgacaaaagaggtgaatcatgcaggatttatcattggaagcacgcctggcagagctggagagccgactggcttttcaggaaatcaccattgaagaactgaacgtcacggtgaccgctcatgaaatggagatggcgaaactgcgcgatcatctgcgtctgctgaccgagaagttaaaagccagccagccgtcgaacatcgcgtcgcaggctgaagaaacgccaccgccacattattgaggcgtaaaaaaagcggggattccccgcttttttgtcaccttttcggtattagtggcaaccacaaccgccgttgcctttaccgccacagcagccttcgccaccgtgttcatgaccgtgatcgtggccatgaccgccgcagcaaccgtcgtggtcgtgatcgtggtgatgatcgtgcgcgccgtgaacgtgaccatgagccagttcttcttcggtcgcttcacgaatcgccacaacctcaacgttgaatttcaggttctgaccggccagcatgtggttaccatcaaccactacgtgatcgtcttcaaccgcagtgatttcaaccggtaccggaccctggtcggtttcagccaggaaacgcatacctacctgcagttcatcaacgcccataaatacgtctttaggaacacgttgcaccaggttttcgtcgtactgaccgtaagcgtcgttcgcgccaacagcgacatcaaatttgtcgccaacttcatgaccttccagcgccgtttccaggccagagatcagggaaccgtgaccatgcaggtagtccagcggcgcactcaccggagactcatcaaccaacacaccgtcttctgtacgtacctgataggccaggctgaccaccaggtcttttgctactttcatgatatctcctgagcatgggaagaatagtggcgcagattgtagcggaattctgcagccgtgtactcactagcttaaaaaaactcggcgcatatcgctagtccggatgaaaaatcccgatcacttgctcatctttgcgaacgtgatcgcgggcttctttgtctgcttctcgcatctgatgtccgcacttaacgcattcaacaatatcaatattattttcgcgccacatcgccattgaatcctgtgcctgacaggccgggcattttgcgcccgcaataaaacgttttcggattgccatctttaccctctactcaaattcatcccagccgtccagctggcgtcgttcttgttgcatttcacgctggaaaatctcttccagttcgcgtcgggcttccctggcgcgagaaatttgtacagtatcggcatgcattgggatgagctctcgcagcatccgcatatccaggcggcgaaaatgcagttgcgcccgctgcgcctgatgcggatgcatcccaagcgtgaccaaagtcttgcgccccagctctaacgcactggagaatgtttcacgggaaaactgcgtcacccctgcctgtaataactcatgcgcttccacacgtccgcgcgctcgcgcaagaatatgcaaatgcggaaagtgctgctggcatatttccaccagcttcatggtgtcttccggctcgttacaggtaatgacgatagactcagcggcctctgcacccgcagaacgtaatagatcgacctgcgtggcgtcgccgtaataaactttgtagccatatttacgcatcaggttaacggcgctgatatcccgctccagcacggtaatgcgcattttatttgccatcagcaaacgaccaatcacctgaccaaaacgcccgaagcccacgacaatgacctggggtttatcatcgttgacccacggtttttcgtcttcttcttccggtccgttaaactggcgggatagccatttatccaccagcttcatcagcaacggcgtggtcatcatggaaagcgtcaccgtcaccagcaacagcgccatctggtcgccctggaataaacgttgtgaagaagcggtagaaaagaggacaaaggcaaactcaccgccctgactcaacacgccagcaaactgcatccgctctgagctacgcacgccatacaatcgcgccagcagatacagcacgagaattttcaccgccaccagcacaaccacgcttatcactacccacaacagatgggtataaagcaccccgaggttgagcgacatgccgacagagataaagaacaaaccgagcagcaagcctttgaagggatcgatagccgtttccagttcatggcgatattcactttccgccagcagcacgcccgcaataaatgtaccgagcgccatcgacagccccagcgcatccataaacaatgcggaacccaacaccagcagcagcgtcgcggcggtgaacacttcccgcacgccagaagctgcaataaagcggaataccggacgcagtaaatagcgcccaccaatcagcatgccgacaaacgccagcaccttcatgccgatcttcatccagtcgaaatgttcgtctgccgaccccgccaacaacggcactaacgccagtgctgggatcactgccagatcctgaaacagcagaaccgaaaacccgagctggccggattcgctgcgattcatccctttctcacgcatcaattgcaacgccattgcagttgaagacatcgcaaggccaatgccaccgaccaccgccgcctgccaggcgaaatccgtcagcatcaataatcccgccagcaacgccgcgcttaacagcacctgtgccgcgcctacgccaaaaatcgaacgccgcagttgccaaagtttggagggattcaactcaaggccgatgataaacatcaggaataccacgccgagttccgaaaagtggaggatctcatcgacgtcgctaataaaccccagcccccacgggccaattgcaatccctgccagcaaatatcccaacacagcgccaatccccagccgcgatgccaacggcaccgcagccaccgccgcgaagagaaacagcactcctgcgagtaaaaaatcggaaccttccatcagcggcctcctggagacagcggatttgccagccagtcaccgtaggctctggcgtggctcgccagctcctttgcgctttgccgtctcgcccagtaaataatgatgggacttaaccaatgcatccggcacatgcccgccgccagttcaaaggggcgcagcacatcgctcatcgggtagcgattcagcgcgtcataacggtaagcactttccggctcgccggtggtaatcacgttacgccagtactttcccgccagttggtttcctcccggcccgctggcaaaaccacgacttaatacccggtccagccactctttcagtagcgccgggcagctataggtataaagaggatgctgaaagacaatcacctcgtgctcgcgcagtaatgcctgctcacgggggatatcaataaaaaaatcgggatagtgcgcgtaaaggtcgtgcacggtaacattgctgagctgcgtggccggtttaagcagtacccggtttgccaccgagtcctgagattccggatgggcatacagcagcaaaactttcgctggctgagacatcatccccctcccggtatggtttttgtgtatagtcgctgttttgggctaccattgcgcccggtgcggcagctcgcccatacattacattatcataatgataagttaacatagtctgaacatacggcgccttatgattgttttctcctcgttacaaattcgtcgcggcgtgcgcgtcctgctggataatgccaccgccaccatcaaccccgggcagaaagtcggcctggtgggtaaaaacggctgtggtaaatctaccctgctggcattgctgaaaaatgaaatcagcgccgacggcggcagctacacctttccgggaagctggcaactggcgtgggtgaatcaggaaacgccagcgttaccgcaagcggcgctggaatatgtcattgacggcgaccgtgaatatcgtcaactggaagcgcagctgcacgacgccaacgaacgtaacgacgggcacgccattgcgaccattcatggcaagctggatgctattgacgcatggagtattcgctcccgtgccgccagcctgctgcacggcctcggtttcagcaatgaacaactggagcgcccggtaagtgatttctccggtggctggcgtatgcgtcttaaccttgcccaggcgctgatttgccgttcagacttgctgctgctcgacgaaccgactaaccacctcgatctcgatgccgttatctggctggaaaaatggttgaagagctatcagggcacgctgatcctgatctctcacgaccgcgacttcctcgatccgatcgttgataaaattattcatatcgaacaacaaagcatgttcgagtacaccggcaactacagttcgtttgaagtacagcgcgccacccgtctggcgcagcaacaagcgatgtatgaaagccagcaggaacgcgtggcacatctgcaaagttatatcgaccgtttccgtgccaaagccaccaaagcgaagcaggcccagagccgcattaagatgcttgagcgtatggagctgattgcccccgcgcacgtcgacaacccgttccgctttagcttccgcgcgccggaaagcctgccaaatccgttactgaagatggaaaaagtcagcgcgggctatggcgatcgcattattctcgactcgattaaactgaacctggtgcccggctcgcgcattggtctgttaggccgcaacggcgcgggtaaatcgacattaatcaaactgttagccggtgaacttgcgccagtcagcggtgaaattggtctggcgaaagggatcaagctcggctacttcgcccagcatcaacttgaatacctgcgcgccgacgaatcacctattcaacatctggcacgtttagcgccgcaggagctggaacaaaaactgcgtgactacctcggcggctttggtttccagggcgataaagtaaccgaagaaacgcgccgcttctccggtggggaaaaagcccgcctggtgctggcattaattgtctggcagcgtccgaatctgctgctgctcgacgaaccgactaaccaccttgacctcgacatgcgtcaggcactcaccgaagcattaatcgagtttgaaggcgcgctggttgtcgtttcgcacgaccgtcatttgctgcgttccaccactgacgatctctacctggttcacgatcgtaaagtcgaaccgttcgacggcgatctggaagattatcaacagtggttgagcgacgtacaaaagcaggaaaaccagaccgacgaagcgccaaaagagaacgcgaacagcgcccaggcacgtaaagatcagaagcgtcgggaagcggagctgcgtgcgcaaacccagccgctgcgtaaagagattgcccgtctggaaaaagagatggagaagctgaacgcgcaactggcgcaggcggaagagaaactcggagacagcgaactgtatgaccagagccgtaaagcggagttgaccgcctgcctgcaacagcaagccagcgccaaatccggcctggaagagtgcgaaatggcgtggctggaagcccaggagcagcttgagcagatgctgctggaaggccaaagcaactgatggcgcagataacgacgaccgatgccaatgaattcagcagcagtgctgaattcacccctatgcgcggctttagcaattgtcatctacaaactatgctgccgcgtttgtttcgtcgtcaggtgaaattcaccccgtactggcagcggctggagttgcccgacggcgattttgtcgatctcgcgtggagtgaagcccctgcacaggctcggcataaaccgcgtttagtggtatttcacgggctggaaggcagtctcaatagcccttacgcccacggtctggttgaggcggcgcaaaagcgcggctggctgggcgtggtgatgcattttcgcggatgcagcggtgaaccaaaccgtatgcaccgcatttaccattcgggcgaaaccgaagacgccagttggtttttacgctggctgcaacgcgaatttggtcatgcgccaacggctgccgtcggctattcgctcggcggtaatatgctggcctgtttgctggcaaaggaaggcaatgatctcccggttgatgcggcggtgattgtctctgcgccgtttatgctggaagcctgtagctatcatatggaaaagggcttttcccgcgtttatcagcgttacttgctgaacctgttaaaagccaatgccgcgcgcaagctggcagcctaccccggaacgctgccgattaatctcgcgcagttaaaatcggtacgtcgcatccgtgaatttgacgatctaatcaccgccagaattcacggctacgccgacgctatcgactattatcgtcagtgtagcgccatgccgatgctgaaccggatcgccaaaccgacgctgattattcacgccaaagacgatccgtttatggatcatcaggtgatcccgaaaccggaaagtctccccccgcaggtggagtatcaactgactgaacatggcggtcatgttggctttattggcggtacattacttcatccgcaaatgtggctggagtcacgcattcctgactggttaacaacgtatctggaggcgaaatcatgttgattccgtggcaagacctctcccccgaaacgctggaaaatttaattgaaagctttgtgttacgtgaaggcaccgattatggtgaacatgagcgtacacttgaacagaaagtcgccgacgtcaaacgccagctacagtgcggagaagcggtgctggtatggtcggagctgcacgaaacggtcaatatcatgccgcgcagtcagtttcgcgaatagcctgcaaccgtcggcggacgagataataatgatagctaagtcatggagttactatgtctgccaaacatccggtcattgcggtaacaggatccagcggcgcggggaccaccaccaccagcctcgcgtttcgtaaaatattcgcgcagttaaatctgcatgcagctgaggtggaaggcgacagttttcaccgttacacccgcccggaaatggacatggcgatccgcaaagcgcgcgacgccgggcggcatatcagctacttcggccccgaggctaacgacttcggcctgctggaacaaaccttcattgaatacggtcagagcggcaaagggaaatctcgcaaatatctgcatacctacgacgaagccgtaccgtggaatcaggtaccggggacattcaccccctggcaacctttaccggaacccactgatgtactgttttatgaaggtttacacggcggcgtagtcacgccacagcataacgttgcgcagcatgtggacttactggtcggcgtggtgcctatcgttaaccttgagtggattcaaaaactgatccgcgacaccagcgagcgcgggcactcacgagaagcagtgatggactcagtagtgcgttcaatggaagactatatcaactacatcacaccgcagttttcccgcacccatcttaacttccagcgcgttcccaccgtcgacacttcaaacccgttcgcggcaaaaggtatcccgtcgctcgatgaaagctttgtggtgatccattttcgtaatctggaagggatcgatttcccctggctgctggcgatgttgcaaggctcattcatttcccacatcaatacgttagtggtaccgggcggcaaaatgggtctggcaatggaattaattatgctgccgctggtgcaacgattgatggaaggaaagaaaatcgagtaactctgctattacgccggataaaatactatccggcttcacaacgggatagttaaatcacgcggcaaccacttcatacgagtgagtaatattcaccgctttttccagcatcaacgccactgaacaatatttctcagcagagagatcaaccgcacgcgcaaccgctgcgtctttcaggtcgcgaccggtgacgataaaatgcagattaatgtgcgtaaacaggcgtggtgcctcttcgcggcgttcagaggtcaattttacttcacaatcgaccacatcctgacgccctttttgcaggatagaaaccacatcgatggcactgcaaccacccgccgccatcaacaccatttccatcggacttggtgctttatcgcctgagttgccgtccattaaaatctggtgaccagaggcggattcgcccagaaaagttaacccttcgacccacttcactcgcgcttgcatttttgctactccactgcgtcaattttcctgacagagtacgcgtactaaccaaatcgcgcaacggaaggcaacctgggtcatgctgaagcgagacaccaggagacacaaagcgaaagctatgctaaaacagtcaggatgctacagtaatacattgatgtactgcatgtatgcaaaggacgtcacattaccgtgcagtacagttgatagccccttcccaggtagcgggaagcatatttcggcaatccagagacagcggcgttatctggctctggagaaagcttataacagaggataaccgcgcatggtgcttggcaaaccgcaaacagacccgactctcgaatggttcttgtctcattgccacattcataagtacccatccaagagcacgcttattcaccagggtgaaaaagcggaaacgctgtactacatcgttaaaggctctgtggcagtgctgatcaaagacgaagagggtaaagaaatgatcctctcctatctgaatcagggtgattttattggcgaactgggcctgtttgaagagggccaggaacgtagcgcatgggtacgtgcgaaaaccgcctgtgaagtggctgaaatttcgtacaaaaaatttcgccaattgattcaggtaaacccggacattctgatgcgtctgtctgcacagatggcgcgtcgtctgcaagtcacttcagagaaagtgggcaacctggcgttcctcgacgtgacgggccgcattgcacagactctgctgaatctggcaaaacaaccagacgctatgactcacccggacggtatgcaaatcaaaattacccgtcaggaaatcggtcagattgtcggctgttctcgtgaaaccgtgggacgcattctgaagatgctggaagatcagaacctgatctccgcacacggtaaaaccatcgtcgtttacggctctcgttaatcccgtcggagtggcgcgttacctggtagcgcgccattttgtttcccccgatgtggcgcagactgatttatcaccccgatatcaactatgcacttcgacaaacgctggtgctatgtttgcccgtggccgttgggttaatgcttggcgaattacgattcggtctgctcttctccctcgttcctgcctgttgcaatattgcgggccttgatacgcctcataaacgttttttcaaacgcttaatcattggtgcgtcgctgtttgccacctgtagcttgctgacacagctactactggcaaaagatgttcccctgccctttttgctgaccggattaacgctggtacttggcgtcactgctgagctggggccattgcacgcaaaattgcttcctgcatcgctgctcgccgccatttttaccctcagtctggcgggatacatgccggtctgggaaccgttgctcatctatgcgttgggcactctctggtacggattgtttaactggttttggttctggatctggcgcgaacaaccgctgcgcgagtcactaagtctgctgtaccgcgaactggcagattattgtgaagccaaatacagcctgcttacccagcacaccgaccctgaaaaagcgctgccgccgctgctggtgcgccagcaaaaagcggtcgatctaattacccagtgctatcagcaaatgcatatgctttccgcgcaaaataatactgattacaagcggatgctgcgtattttccaggaggcgctggatttacaggaacatatttcggtcagtttgcatcagccggaagaggtgcaaaagctggtcgagcgtagccatgcggaagaagttatccgctggaatgcgcaaaccgtcgccgctcgcctgcgcgtgctggctgatgacattctttaccatcgcctgccaacgcgttttacgatggaaaagcaaattggcgcactggaaaaaatcgcccgccagcatccggataatccggttgggcaattctgctactggcatttcagccgcatcgcccgcgtgctgcgcacccaaaaaccgctctatgcccgtgacttactggccgataaacagcggcgaatgccgttacttccggcgctgaaaagttatctgtcactaaagtctccggcgctacgcaatgccggacgactcagtgtgatgttaagcgttgccagcctgatgggcaccgcgctgcatctgccgaagtcgtactggatcctgatgacggtattgctggtgacacaaaatggctatggcgcaacccgtctgaggattgtgaatcgctccgtgggaaccgtggtcgggttaatcattgcgggcgtggcgctgcactttaaaattcccgaaggttacaccctgacgttgatgctgattaccaccctcgccagctacctgatattgcgcaaaaactacggctgggcgacggtcggttttactattaccgcagtgtataccctgcaactattgtggttgaacggcgagcaatacatccttccgcgtcttatcgataccattattggttgtttaattgctttcggcggtactgtctggctgtggccgcagtggcagagcgggttattgcgtaaaaacgcccatgacgctttagaagcctatcaggaagcgattcgcttgattcttagcgaggatccgcaacctacgccactggcctggcagcgaatgcgggtaaatcaggcacataacactctgtataactcattgaatcaggcgatgcaggaaccggcgtttaacagccattatctggcagatatgaaactgtgggtaacgcacagccagtttattgttgagcatattaatgccatgaccacgctggcgcgggaacaccgggcattgccacctgaactggcacaagagtatttacagtcttgtgaaatcgccattcagcgttgtcagcagcgactggaatatgacgaaccggggagttctggcgatgccaatatcatggattcgccggagatgcagccgcacgaaggcgcggcaggtacgctggagcagcatttacagcgggttattggtcatctgaacaccatgcacaccatttcgtcgatggcatggcgtcagcgaccgcatcacgggatttggctgagtcgcaagttgcgggattcgaaggcgtaatgcaggctaaaccatcggataaggcattcacgccgcatccgacatcttttgcctgatgcttcgtatttacgccccaaccaccttcgccaccgcgtgggcgaaacgttgcatcccttcatcgatatccgcatcttccaccaccagcgacggtgcaaaacgcatcacatccggtccggcattcagcaccattacgccagcctctgcgcccgcatacaggaaatcacgcgcccgacctttgtactgtggtttcagctctgcgccaatcaacagccccataccgcgaatatcgctaaacacatcgtactgctgatcgatcttctgcagatggtcaacaaaacgctggcgtttcgcctgaatgccttccagcacttcagggggattgatgatatcaaacgccgcccccgctactgcacaggccagaggattaccgccgtaggtggaaccgtgagaaccaggatgaaacgcagaagcaatttccgccgtggtcagcatggcgctaatcgggaagccgccgcctaacgctttcgcagaggtcagaatatccggcgtcacgccgtagtgcatgtaagcaaacaaatcgccggtccgccccatcccgcactgcacttcatcaaacaccaataatgcctgatgttgatcgcacagctcgcgcaagccctgcaaaaactctggcgtcgcagccgtcacgccgccctcgccctggatcggctcaaccaccaccgcacaggtgtgatcatccatcactgctttcactgcgtggagatcgttaaagggaacgtggatgatgtctgccggtttcggcccaaagccgtcggaatattttggctgcccacccaccgaaacggtaaacagcgagcgaccatgaaaagcgttatggaaggcaataattttggttttgaacgggctatgacgcacacaggcgtaatgacgtgccagtttaaaggcggtttcgttagcttccgtgccggagttcataaacaccacgcgttcggcaaacgttgcctcaatcagtttacgcccaagacgcagcgccggttcattggtgaaaacgttactgatatgccacagaatttcgccctgggtttttaacgcgttcaccagcgcaggatggcaatggcccaacgccgtaactgcaatgccacccgcgaaatcgacatactccttgccttgctgatcccagattcggctgccctgaccttttaccggaataaactctgccggagcataaatcggcaggatcacttcatcgaaagtcgcgcgtgtaattgctgtttgttcaattgccatctcatgatcaccctgttacgcataaacaaatgtgaaattataatcacaaaatatgcataaaaaatcactaaatggcaatcagaaatcagcgatgcaggaaattagccagcagttgatgtccttgttcgctaagaatactttctggatggaactgcacaccttccagatcccactggcgatggcgaatccccataatctcgcgggtttcgctccaggccgtcacgtcaaagcacgctggtaatgagtcaggttccaccaccagcgaatggtagcgtgtcacggtaagtggatttgccagcccccgaaatacgccctcaccgctatgtgtaatcggcgaggttttgccgtgcatgacctttgcggcgcgcacaactttgccgccaaatgcctgcgccattgcctgatgaccgaggcagacgccaagaatcggcaagcgcccggcatagtgacgaataacgtcaagggagatcccggcttcatctggcgtacaggggccaggtgagatgacaattttttgtggtttaagggcgtcgatatccgccagcgtcaacgcatcgttgcgcttaaccagcacatccgcccccagttcacaaaagtactggtagaggttccaggtaaaagaatcgtagttatctataagcaggatcatggcggctccggtacgaaagaaccgcgctattttactcagattccccggctttgcttaccactttgctaaatatcatctgcagtgcggtgagatcccccattgccccactctgatttgcctgattccaggcctctttttcgataccctgccagctcagttgatatccggcatgaatcgccagttgctcgaagaagatccgctgtgccagaccacttcccacccggaagggatgcagcacgttgatttcacaatagtaatgcgccagccgctcgacgaacttcgctttctccaggccaaccagataaccttcttcctccagatcctgcatcagggcattgccctctttttcgatataagcaaagtggcagaacggcgtatcgccctgataaatatcaacttcacgcagttgccctgcccagtcgaaaatatcctggtacagctggcgatggatagtgcgcaaatgcggtaaaccgcgcaccagcggaccaagctcaatggtcgcagcacgcagcgccgtcatttcgtaagcggcctgttccagccgctgctgctgacggatgttcagccggttacgcatgatatcaaggccaggataaagatacggatcgcgcccttcgccgaatttatcgctcatagtgcctcctcagctcttcaaggcgcgctaaagcctctgcggcagtaagagtgactaaaggcatctcgacgccttcaagacggcgactggcctggaaattacgattacgctgaagctcccagagacgggacttttgcttatcggtgagtttcttcacttgatgcctccctgaacgtgtccatttgccacaagtataagcggcaaatccgggttacgccgggagagcagaagcgcgggcaagattgcccgcgcgagaaatcattacggcaggactttagcggaaaggataactaccggttttgacggcacattctggtacggaccaacatcatgagtcggcacctgggaaatcttatcggcaacgtccatgcctttcaccactttaccaaataccgcgtaaccgaaatcacgctgaccatggtcaaggaaggcgttatcggcaacgttgataaagaactggctggtggcgctgtctttgtcagcggtacgcgccatcgcgatggtgccacgcgtgttgcgcaggccgttatcggcttcatttttgattggcgggtttggttttttctgctgcatctgctcggtgaaaccgccgccctgaatcataaagccaggaatgacgcggtgaaaggtagtgttgttataaaaaccgctgttcacataatcgacaaagttttgcacagacactggcgctttttgtttatccagctccagttcgatgttaccagctgaggttgtcaacaatacgtgcgggtcccctttcgctgccattgctgcgggagaaagagcagaaagagcgaaaacagcagccatcgccgccagggtcgatttgaacatgagatttccttaacaaacagagcagaaaaaaagcaagtgaagagattctaaatagccttcaagaacaaggccatccctttacctaattttacgtatctgaaatatatgtaacctgacgatcactttttattccgtgatcaaaatcacctcttaaaatgcaatttagcaaccgattgcaataaaacatttaaacagatcacaaaatcacctaaaatcgcccgctcgcggcatatcccgctatgccattttatttttgaacgcaggccaatcatgactaacagcaatcgcatcaagctcacatggattagctttctctcctacgcactgactggtgcgttggttattgtcaccgggatggtgatgggaaatatcgccgattatttcaatctgcctgtttccagtatgagtaacaccttcaccttcctcaacgccggcattttaatctctatcttcctcaacgcctggctgatggaaatcgtcccgttgaaaacgcagttacgttttggctttctcctgatggtgctggcggttgccggtttgatgttcagccacagcctggcgctgttctcgacggcgatgttcattctcggggtggtcagcggcattactatgtcgattggtacattcctgataacacaaatgtatgaagggcgtcagcgcggttcccgcctgttatttactgactccttcttcagtatggctgggatgattttcccaatgatcgccgcgtttctactggcgcgcagcattgagtggtactgggtttatgcctgcatcgggctggtgtatgtcgctatttttattctgaccttcggctgtgagttcccggcactgggcaaacatgcaccaaaaacggatgctccggtagagaaagaaaagtgggggatcggcgtactgtttctctctgttgcggcgctgtgctacatcctcggtcagttaggttttatctcctgggtgcctgagtatgccaaaggcctgggcatgagcctgaacgacgcgggcacgctggtgagtaacttctggatgtcatacatggtcggcatgtgggcgttcagctttattcttcgcttctttgatttgcaacgcattctgaccgtactggctggtctggctgcgattctgatgtacgtctttaacaccggaacaccagcacatatggcgtggtcaattctcgctctgggcttcttctccagcgcgatctataccaccatcatcaccctgggttcacagcagaccaaagtaccgtcgccaaaactggttaactttgtcctgacctgcggaaccatcggtactatgttgacctttgtggttaccggcccgattgttgaacatagcggtccgcaggcggcactgcttacagcaaacggtctgtacgctgtcgtctttgtgatgtgcttcctgttaggtttcgtcagccgtcaccgtcagcataacaccctgacctctcattaattgctaatgccggacggcactatcgtcgtccggccttttcctctcttcccccgctacgtgcatctatttctataaacccgttcattttgtccattttttgcacaaacatgaaatgtcagacaattccgtgacttaagaaaatttatacaaatcagcaacataccacttaaggagtatataaaggtgaatttgatttacatcaataagcggggttgctgaatcgttaaggtaggcggtaatagaaaagaaatcgaggcaaaaatgagcaaagtcagactcgcaattatcggtaacggtatggtcggccatcgctttatcgaagatcttcttgataaatctgatgcggccaactttgatattaccgttttctgtgaagaaccgcgcatcgcttatgaccgcgtacacctctcgtcttacttctctcaccacaccgccgaagagctgtcgctggtgcgcgaaggcttctacgagaaacacggcatcaaagttctggtcggcgaacgcgctatcaccatcaaccgtcaggagaaggtgattcactccagcgccggacgtaccgttttttatgacaagctgatcatggcaaccggttcctacccgtggatcccaccaatcaaaggttctgatactcaggactgctttgtctatcgcaccattgaagacctcaacgccattgaatcctgcgcccgtcgcagcaaacgcggtgccgttgttggtggcggcctgttaggtctggaagccgctggcgcgctgaaaaacttaggtattgaaacccacgttatcgaatttgcccctatgctgatggcggaacagcttgatcagatgggtggcgagcagctgcgtcgcaaaatcgaaagtatgggcgtgcgcgttcacaccagcaaaaacacccttgagattgtgcaggaaggtgtcgaagcgcgtaaaaccatgcgttttgccgacggcagcgaactggaagtcgactttatcgtcttctctaccggtatccgtccgcgcgataagctggcaacccagtgtggtctggacgttgctccgcgtgggggtatcgtcattaatgattcctgccagacttccgatccggatatctacgccatcggtgaatgcgcaagctggaacaaccgtgtatttggtctggtagcacctggctacaaaatggcgcaggtcgccgttgaccatattctcggtagcgaaaacgcctttgaaggtgctgaccttagcgccaagctgaaactgctgggcgtagacgtaggcggtattggtgatgcgcacggtcgcacgcctggcgcacgtagctacgtttacctcgacgaaagtaaagagatctacaaacgcctgattgtcagcgaagacaacaaaaccctgctcggtgcggtactggtgggcgataccagcgactacggtaacctgctgcaactggtgctgaacgctatcgaactgccggaaaacccggattccctgatcctgccagcacactctggtagcggcaagccgtctatcggtgttgataaactgccggacagcgcgcaaatctgctcctgcttcgacgtcactaaaggtgatctgattgctgccatcaacaaaggctgccacacagttgcggcgctgaaagctgaaaccaaagcgggtactggctgcggtggctgtatcccgctggtcactcaggtactgaacgcggaactggcgaaacagggcatcgaagttaacaacaacctgtgcgaacactttgcttattcgcgtcaggaactgttccatttgatccgcgttgaaggcattaaaaccttcgaagaactgctggcgaaacacggcaaaggctacggttgtgaagtttgtaaaccaaccgtcggttcgctgctggcctcctgctggaacgaatacattctgaagccggaacatactccgctgcaggattctaacgacaacttcctcgctaacatccagaaagacggcacctactcggtgatcccgcgttctccgggcggtgaaatcaccccggaagggctgatggcagtgggtcgtatcgcgcgtgaatttaatctctacaccaaaatcaccggctcccagcgcctggcgatgtttggcgcacagaaagacgatctgccggaaatctggcgtcagctgattgaagctggcttcgaaaccggtcatgcctatgcgaaagcactgcgtatggcgaaaacctgcgtgggtagcacctggtgccgctacggtgttggcgatagcgtcggcctcggcgtggaactggaaaaccgctacaaaggcatccgtacgccgcacaaaatgaagttcggtgtctccggctgtacccgtgaatgttcagaagctcagggtaaagacgtgggtattatcgccactgaaaaaggctggaacctgtatgtttgcggtaacggcggcatgaaaccgcgtcatgcggatctgctggcagcggatatcgatcgcgaaacgctgatcaaatatctcgaccgcttcatgatgttctacatccgtaccgccgacaaactgacgcgtaccgcgccgtggttagaaaacctcgaaggcggcatcgattacctgaaagcggtgatcattgacgacaaactggggctgaacgctcatctggaagaagagatggcgcgcctgcgtgaagcggtagtgtgtgagtggactgaaacggtcaatacgccgtctgcgcagactcgcttcaaacacttcatcaacagcgacaagcgtgacccgaacgtgcagatggtgccagagcgcgaacagcaccgtccggcaacgccgtatgaacgtatcccggtaactctggtggaggacaacgcatgagccagtggaaagacatctgcaaaatcgatgacatcctgcctgaaaccggcgtctgcgcgctgttaggtgacgagcaggtagcgattttccgcccgtatcacagcgaccaggtgtttgcgatcagcaacattgatccgttcttcgagtccagcgtgctatcacgcgggctgattgcggaacaccagggcgagctgtgggtcgccagcccgctgaaaaaacagcgttttcgcttaagtgatggcttgtgcatggaagacgaacagttttccgtcaaacattacgaagcgcgagtgaaagacggcgtggtgcagctgcgcggttaatgttttaacgggaggcgcaatgcctcccctttttgcatggtcctgtaatgaccttcggtatattgcagaacattttttaaactttttgttttattttttgtttttattttttaaaggataatcaaatgtttacagacactattaataagtgtgcggctaatgctgcgcgcattgcacgcctgtcggcaaataacccgctcggcttttgggtcagctccgccatggcgggcgcatatgtgggtcttgggatcatcctgattttcacgctcggtaatttgctcgacccgtccgtacgtccgctggtgatgggcgcgacctttggtatcgccttaacgctggtgattatcgccggttctgaactgttcaccggacacgccatgttcctcacctttggggtaaaagcgggcagcatcagccacgggcaaatgtgggcaatcctgccgcaaacctggctgggtaacctggtcggttccgtcttcgttgccatgctctatagctggggcggcggtagcctgctgccggtagataccagcatcgttcactccgtcgcgctggctaaaaccactgcaccggcaatggtactgttcttcaaaggtgcattgtgtaactggctggtttgcctggctatctggatggcgctgcgcactgaaggggcggcgaaatttatcgctatctggtggtgtctgctggcatttatcgcgtccggctacgagcactccatcgctaacatgacgctgttcgccctctcctggttcggcaaccacagcgaagcctacacgctggcgggtattggtcataacctgctgtgggtgacgctgggtaatactttatcgggtgccgtattcatgggattgggttattggtatgctacgccgaaagcgaatcgtccggttgcggacaaatttaatcaaactgaaacggctgccggttaattactaaggggtttttacgtggatcatttgcctatattttgccaattacgcgatcgcgactgtctgattgtcggcggtggtgatgtcgcggaacgcaaagcaaggttgctgttagacgcaggcgctcgcttaacggtgaatgcattagcgtttattccacagttcaccgcatgggcagatgcaggcatgttaaccctcgtcgaagggccatttgatgaaagccttctcgacacctgctggctggcgattgcagcgacggatgatgacacgcttaaccagcgcgtcagcgaagccgctgaagctcgtcgcatcttctgtaacgtagtcgatgcgccgaaagccgccagctttattatgccgtcgattattgaccgctcaccgctaatggtagcggtctcctctggcggcacctctccggttctggcgcgcctgttgcgcgaaaaactcgaatcactgctgccgttgcatctgggccaggtggcgaaatatgccgggcaattacgcgggcgagtgaaacaacagttcgccacgatgagtgagcgtcgccgtttctgggagaaattgttcgttaacgaccgcctggcgcagtcgctggcaaacaacgatcagaaagccattactgaaacgaccgaacagttaatcaacgaaccgctcgaccatcgcggtgaagtggtgctggttggtgcaggtccgggcgatgccgggctgctgacgctgaaaggactgcaacaaattcagcaggcagatgtggtggtctacgaccgtctggtttctgacgatattatgaatctggtacgccgcgatgctgatcgcgttttcgtcggcaaacgcgcgggataccactgtgtaccgcaggaagagattaaccagatcctgctgcgggaagcgcaaaaaggcaaacgcgtggtgcggctgaaaggtggcgatccgtttatttttggccgtggtggcgaagagctggaaacactgtgcaacgcgggtattccgttctcggtggttccgggtattaccgcagcttctggttgctctgcctattcgggtattccactcacgcatcgcgattatgcccagagcgtacgcttaattaccggacacttaaaaaccggtggcgagctggactgggaaaacctggcggcagaaaaacagacgctggtgttctatatgggattgaatcaggccgcgactattcagcaaaagctgattgaacacggtatgcctggcgaaatgccggtggcaattgtcgaaaacggaacggcagtcacgcagcgcgtgattgacggtacgctcacgcaactcggtgaacttgctcagcaaatgaacagtccatcgctaattattattggtcgggttgttggcctgcgcgataaactgaactggttctccaaccattaatttaacccgggccagagaattctggccttcttaatgactctttttatatattcagcaaataaaacataaccccttaataaatattatctgctaatgggttatattcaccgttacagcgacttacaaaattaagtcattcgctcactgacgccaattaaatattcctgtatcgttcttaacgagcagtctgcttatattcatataatcaatgaatattaattaatatataatacatagggaatgtaaatgaacaaatttattaaagttgcactggtaggtgcagtactggctacgttaactgcatgtactggtcatattgaaaaccgtgataagaactgctcttacgactacctgctgcacccggcaatttctatttctaaaatcattggcggttgcggtcctactgcacagtaagtctctgacagaaatcggctaacaccggtttaattgcccgacgccctctggattttccgagggcgtatttgtttctatgtccttcttgcccccgcccgtaaaaatattttcactttaaattcaatttgataactacatccattagccacagcgcgatcctgtgcgaaattttgtgatcttcctccacattacataacatcatatgttgttatattcatcatgcattgtcatgttaccttttaaatgactgcaaactctcccctacaacgtattggacaagaaaaaggtatcgctatgggaagccaggaactccaacgcaagctcggattttgggccgttcttgcaatcgccgtcgggacaaccgtcggctccggtatttttgtatctgtgggtgaagtggcaaaagcagcgggcacgccgtggcttacggtgctcgcgtttgtcattggcgggttaattgtgatcccgcaaatgtgcgtctatgcggaactatccaccgcttatccggaaaatggcgcagattatgtttatctgaaaaatgccggaagccgaccgctggctttcctctccggctgggccagcttctgggccaacgatgcaccgtcattgtcgattatggcgctggcgattgtcagcaatcttggctttttaacgcctatcgatccgttgctcggtaaatttatcgccgccggattaattatcgcctttatgttgctacacctgcgctccgttgaaggcggcgcagcgtttcagacgctaattaccatcgccaaaattatcccgttcactatcgtcattggccttgggatcttctggtttaaagcggagaattttgccgcccctaccaccactgcgattggcgcaacgggcagctttatggcgctgctggcggggatctctgccaccagttggtcgtataccggcatggcctctatctgttatatgaccggcgaaattaaaaaccccggaaaaaccatgccacgagcgctgattggttcctgtctgctggttctggtgctctacaccctgctggcgctggtgatttccggcctgatgcccttcgacaaactcgccaattctgaaacgccgatttccgacgccctgacctggatccccgcactcggcagcaccgctgggatctttgttgccatcacggcgatgatcgtcattcttggttcgctttccagctgcgtgatgtaccagccgcggctggaatacgcgatggcgaaagacaacctgttctttaaatgcttcggccatgtgcatccgaaatacaacacgccggatgtctccatcatcctgcaaggggcgctggggatcttcttcatcttcgtttccgatctcaccagcctgctgggttatttcaccctggtgatgtgtttcaaaaataccctcaccttcggctccatcatctggtgtcgtaaacgcgacgattacaaaccgctgtggcgtactccggctttcgggctgatgaccaccctcgccattgcgtcaagcctcattctggtcgcctcaacctttgtctgggcaccgattcccggccttatctgcgccgtcatcgttattgctactggtctgcctgcttacgccttctgggcgaagcgtagccgccagctcaacgctttgtcgtaatgttatctggagaaaataaaatgttggatattgataaaagcaccgtggactttctggtcaccgaaaatatggttcaggaagtggaaaaagttctcagccatgacgttccgctggtgcacgccatcgtggaagagatggtgaagcgcgacattgatcgtatttatttcgttgcctgcggctcgccactcaacgcggcgcaaacggcgaaacatctggcggatcgcttttccgatcttcaggtctacgccatttccggctgggagttctgcgataacaccccgtatcgcctcgacgatcgttgcgcggtgattggcgtttctgactacggtaaaacggaagaggtaatcaaagcgctagagctgggccgggcctgcggcgcactcactgcggcgttcaccaaacgcgcggacagcccgattacctcggcggcggaatttagcattgattatcaggccgactgtatctgggaaattcacctgctgctctgctacagcgtggtgctggagatgatcacccgcctcgcgccgaacgcggaaatcggcaagatcaaaaacgatctcaagccgttgccgaatgcgctcggtcatctggtacgcacctgggaagaaaaaggccgccagcttggtgaactggccagccagtggccgatgatttataccgttgctgcgggtccgctgcgtccgctgggttacaaagaaggcattgtaacgctgatggaatttacctggacgcacggctgcgtgattgagagcggagagttccgccatggcccgctggagattgtcgaaccgggcgttccgttcctgttcctgctcggcaatgatgaaagtcgccacaccaccgaacgcgccattaactttgttaaacagcgtactgacaacgtgatcgtcatcgattacgccgaaatttcgcaagggctgcacccgtggctggcaccgttcctgatgttcgtgccaatggagtggctctgctactacctgtctatttacaaagatcacaacccggatgaacgccgctattacggtggtctggtggaatattaatccctctcccggcccggcaacgggccggatttacgcaaggagttacccgatgaaaacaggtatgtttacctgcggccaccagcggctgcctattgaacacgcatttcgtgatgcaagcgagctgggttacgacggcatcgaaatttggggcggtcgcccgcacgcgttcgcgccggacttaaaagcgggcggcatcaaacaaatcaaggcgctggcgcagacgtatcagatgccgattatcggctatacgccagaaaccaacggctatccgtataacatgatgctgggcgatgaacatatgcgtcgcgaaagcctcgacatgatcaagctggcgatggatatggcaaaagagatgaacgcgggttatacgctgatttccgcggcccacgcaggctatctcacgccacctaatgttatctggggacggctggcagagaacctaagcgaactgtgtgagtacgcggaaaacatcggcatggatctaatcctcgaaccgttaacgccgtatgaatcgaacgtcgtgtgtaatgctaatgatgtgcttcatgcgctggcgctggtgccttcgccgcgcctgttcagcatggtcgacatttgcgcgccgtatgtccaggcggaaccggtgatgagttatttcgacaaactgggcgataaattatcgtcatctgcatattgtcgacagcgacggggccagcgacacgcattacattcctggagaaggcaaaatgccgctgcgggaactgatgcgcgatattattgagcggggctatgagggttactgtacggtggagctggtgacgatgtatatgaacgagcccagactctatgcccgccaggcgctggaacgctttcgcgcgctgctgccggaggatgagagatgaaaaccctggcgacaatcggcgataactgcgtcgatatctacccgcaactgaataaagcgttttctggcggtaatgcggtcaatgtggcggtgtactgcactcgctacggcatacagccgggatgcattaccttggtgggtgacgatgactacggcacaaagctgaagcaggatctcgcccgcatgggcgtcgatatcagccatgtccatacgaaacacggcgttaccgcacaaactcaggtggaactgcacgacaatgatcgcgtttttggcgactacaccgaaggcgtgatggccgactttgccctgagtgaagaggattacgcctggctggcgcagtatgacattgtgcacgcggcaatctggggacatgcggaagacgcattcccacagctgcacgctgcgggcaaacttaccgctttcgacttctccgacaagtgggacagcccgctctggcagacactggtgccgcatctcgattttgcctttgcctccgcaccgcaagaagacgaagcgctgcgtctgaagatgaaagcgattgttgcccgtggcgcaggaacagtgattgtcacgctgggtgaaaacggcagcattgcctgggatggcgcgcagttctggcgtcaggctcctgaaccggtgacggttatcgacaccatgggtgccggagattcgttcattgccggattcctttgcggctggtctgcggggatgacattaccgcaggcgatggcgcagggaacggcgtgcgcggcgaaaaccattcagtatcacggtgcctggtaggtataacgttggcgtgagcatctccgcgccaacgtgctgttacttgccggaaaacgaccctataatccgtgtaattcattctttatttcagggtcgattatgtcagctacggaccgctactctcatcaactcctctacgctaccgtccgccagcggctgctggatgatatcgcgcagggggtttaccaggccgggcaacagatccctaccgaaaacgagctttgtacgcaatataacgtcagccgcattactattcgcaaagctatcagcgacttagtggcagacggcgtactgatccgctggcagggcaaaggcacctttgtacaaagccagaaagttgaaaacgccctgcttactgtcagtggttttaccgattttggcgtctcacaaggcaaggcgacgaaagagaaagtgatcgaacaggaacgggtcagcgccgcgccgttttgcgaaaagctgaacatccccggaaacagcgaagtgttccatctctgccgggtgatgtatctcgataaagagccgctgtttattgatagttcatggatcccgctgtcgcgttatcctgactttgatgagatttacgtcgaaggaagctccacctatcagttatttcaggagcgttttgacacgcgagtggtcagcgacaaaaagaccatcgatatctttgccgccacccgcccgcaggcaaaatggctgaaatgcgaactgggcgaaccgttgtttcgcatcagcaaaatcgcctttgatcagaatgacaaaccggtgcacgtctccgaactcttctgccgcgccaatcgcatcaccttaacgattgataataaaagacattaaccgtaggccggataagatgcgccagcatcgcatccggcgatgctggcgcgttgaattttacatcccgtacgttcccctcaccctaaccctctccccaaaggggcgaggggaccgttcagtacggaatttagcttgacggtgctatccagcattaaatactggcaatactctcacgcaaaatccgcagcaccgtctcttcaccgttgcgattcgggttaatgcgaatcgcacaatgttctgattgtggattcgcctggcgaaacgttccggaaaggcgataaaagagcggcgggatttcatatttcgactctgcacccaccgggtaaggcaaggcaccgcgcttttgcgcctcttccagcactctggcggcaatcggctgatgaaactcgacaatcaacaccttcgactgcgcattagcaatcaccgcgcttttcacttccggcaccgcaccaccgttaagcaaagccagcaaccgttcagatacccccgcctgcaccgcgtgcatcactggcgcaaacaccagcccacacaagacttccagcgcctgagcgccctgaatctggctgccgccggaatagagcgtggagcgaatccgactaataacatcggcatcgcctaccaccgcgccaacaccctccggcccaaacagcttgaagcaggaaaaagtcgagacatttgccccgcattcgcagccaattcgcgccactttcatcaccgcatagttgtcatcggttaatgcaggaacgccagccgagcgcaatgttgccagcacatctgccagaatgtagccgtcctgcggctgctggcgcgtatgctgcaccagcgccgcatccggtagttgctcgtcgacgacctgcttcagtgccgacaggtcattgaaatcagcagtaataagcgtcagccccatctgctcaataatgacctgtgtcgtcgggtaaacaggcgcatcatgtaccagaagacgctgccccggtttgagcaaagccgccaacgccgcacgaatcgcgccagtacccgcaccctgcaccagcgccgcagcctgtgcgtgaaatgcatcagccagcacctgttccacacgctgggtaacgcgcggttgattcagtcctggcgttaagcctaaatcaccgccagtaagaaactcgctgccggggaaatggcgacaaatgctatccaccagcgcaaactgcttttgctgcgcctcaataatcgtcagactttgcagaggaaacgtcttcataggtgccttccttaagccggaacgaacaggccaagccagtaaagaacattcagcagaataccggtgatcattactgccacgaccggtgccgccattttctgtaccggacggcccagggattcgttgaggaagtaaatggcaaccgcgatagagaatccggtataacccgccatcttaattgctgcgaaaatcgaaccgaccagcagcgccacttccatcagcatattcatggcgttacggatgttatccgacgcattacgcaccgacgggtagcgtcccagccatttgccgatcgaacgaagcagcaagacttccgccgaaataaccactgcgcctaataccgctgcaactatcggattcggcgagagatagcccaccgcataaacaaaggtaaagcccgcaactgcatacacacccgttgctaaggcggtggtggcaatcaacggtacaaaacccagcccgcgcataaattctgccagtgccgcctggttgatcagcgtttgcgattgttccggcgttacgcctgcggagtacgctttctccagagtgaagatcgacacttcactgccggcgaaaatcttcatgctggcaacggcggcaatcaatgctcccacgatggcgatatagggtaagtttttgataatccgcgacgtgcgttcttcaaacaccgaaagcccgctggcatcaatatcattttcatcacgatgacgcaggtcgtgagttatcgcgatccccagcagcatcaccatgccaataaagatttcgatggattcagggttaagatgtgggaaatagcgcacgactaccacacgggtcatcagaacaaccacggcggcgaccagactttgcttccagccaaactggtagaaaatcgccaccagcgggaacagtgcaaaagcagaaaccaccggcgagcttaattccccgaggctacctaatacatccaccggcagcgcggtcagcagctggtttactggcaacaggcaagtaaggatcaacacgccccagatagcgccaagaccaaacgccatcaggctgtttatcgccagtacgccgaggatatcggtaggaagaaagagtaaccatgcgttgagcagcccggttttcagggtaaaagagatccccaccgaggccacaaaaccaatgctcagaccaaaagcgatactccccgcctcgcgacggttcatatagccttcaatcagttgcggcaggatcgggcggataccgtcatgaaaaacagccgccgagcgatgcgccagaagcgatgtcatacccgtcaggcacgccaccacgataatctgaatatacagatccatagtcgtgccttttatttcagatggttaatcagcatcggaatcgcgtgttcgacgtgctcaacggaaaggccaaacgccacttttccttcagcgatcattttggcgatatgctcgtctttcgctttaatgcctggtttggcaatggtgcaacttttgttatagccaatcaccgcgatggcaatcgacaatgccgcgcccgcaccggtattacacgcaccgatgtagtaatccagttgcccggatttcactttcattgccgcttccatgtcgttgtgaatgaaaacttcaaaactgccaggagccgtcgcttcaatggtttttttaatctgctcacgctgtaagcctgcaacgccaatctttttcatgagtctgtccttattggaaaaattgagagggagtttcacgtaacatcacatccacatcggcctgactgaatcctgactggcgcaattgcggaataaaggtggtcaataaatagtcatagccataaccaccattggcttttaaatgggagcggcgcgtaatatccatcgacagcatgacgcggttcagcaacccacggtcacgtagcgcgtggagcatcgcaatgcgcttttcgtccgggtagtaactgttcttaccaatggtgtcgaactgcacgtacgcgccgagatcgatcatcttcaaaatgttgtcgaggttgtctttcagatcgcagtgaccaacggtgacgcgcgaaagatcaactccgtgggcttgcaacagagccagttgttccagccccatggtgctgaacgacgtatgcgtggagatcgggcgtccggtctggttatgcgccagcgcagcggcaataaataccttctcttccagcggcgtaatctttccttcgctggagccgatctccgcgatgatcccggctttcagctccgtgccatcgataccctgttcaatttcatcgaccatctcctgcgccagttcctgcacgctgcgggtcaccacatgttccgggaaaaacgcatcctggtaataaccagtacaggccaccacgttgatcccggtttcgcgcattacaccgagcataaattgcgcattgcgccccatgtaacggttggtcatctcaatcacattacgtacaccccgggtcatcaggtcgttcatctcctggcaaatgaacgcatactgatcaaggcggcagtccacgttgtttttaaagccggagagatcaatatgcagatgctcatgggccagggtgtaacccgtcggatcaaaactcatagggtgtctcctgcaaaccggagggaggaaagaaaagagcgaccattttgtggcggtggcgcacggaaaaattcacacacggtagctcccacatcagaaagcgtggtgcgcacaccgagctgcgtagcagccaggccttgctgataaaccagcagcggcaccacttcgcgggtatggtggctgtgaccaatggtcggatcgttgccgtgatccgccatcacgaccaggcaatcatctggctgcatcgcatcaacaagccgggcaaggttacggtcaacgacctgcaaacgttcggcataacgtgcgacgtcttctgcatgaccagcgaggtcggtttcctggatattggtgcaaataaacgccgtcggatgggtgttaaattcgtcgagggtgatatccataatccgctggctatccaccaggttttgccagctcacgccataaggattgctgacgatatctgccaccttacccaccagcacggttggcacgcccgcctcatacagtttttgcggcacctgcacttttttatcgacaccgtagcccatatgcacgacctggaagccgttgtcataagcgccagaacgcggcgcattgataccaataaagcgcccttctttgctttctgcggcatcgagaatgcgttgactgtcggttaacaggccaccaaatgtaatgacccgaccgacctgtacctgctcacgcacgatacgaccaattttgattgcgtcgtcaaaagagatcacagagagattggcggtaatgttatagacttggcctaaatccgcctcgagattatcgccaatcgcaaccgcctgattgacccacagaaattacagttcatcgccacggcgctccacctgccaaccggcggatactaatgcctgctcaacacggtcaatcacatcgcgaaaaggcatccgcagcggcggtaacgggcgcgtgcctaaaatttcctgatgccccataaaggtatcgccaccttcatgttgcagctctgccacgccccaggttgcggaatctgacggctgcatatcgcctggcgcataacccaatgcgttgattagccccagcttctccagcgttggtagctgcaaatgcggcaactggctcaggatgtgaccacatgtattcgctcccgcatcttgcggacgcaccagcgtgacatctttcattgcccctacgccaaagctatcaatcactaacaccacaaatcgcgccattacgcccccagagagtttccaagactgtcataacgaccaactattttcggttcgccacggtgaataccggacaccagcaccacatcgctacgggtgacaaaaatctgcgtgcggaaacagagcaccactgcactgcttaccggaaactcgcctgccagcgacagggtgtagtcgatactgctgtcatccacagttttgagattggtttcagtaatcttttgattttctggcgtaaacaccaacgcatgttgcgcatgaccacgacggtagtaaccgccgccgtagcagtagctgtcgccacggaaatgatgggagatttcactcaaccagagcatcgcgatacgttcagactgatcgccctgctggtttgccggaatagtgcccgtcagcgcatgaccgggttcggcatgagtcacaccgtattacgccagtaatggcagcgaagtgcagctggtcgctgaaggcgcgttcagttgctcaagtgcaataccagatttcgccagttgatcccgtgcctgtatcagcgtgtgaagattcggtgtcggcaaaacttttccggcagcctcatcccaaagcaggcaagggaaatgggtaagtccggctaaatgcagccccggcagtttcttaatttcagcaaccacctcgtgcagcgaatgctgtacaaaaccgctctcctgccccggataaagaaaatcatcgtcgctataaactttgagcagcacaaactgcacacgtccggccttcaccgctgccgcagaaacttcccgcgctttgtcgagagtaaacacggtgatgacgtcggtgccctgttcaacggcgtcagcaacctgatgacaagggatttgtaccagatgcccctgatgtgccaccgacaaaccagcgcggcgcatgactcgcgcctctttgtaatccaccgccacaatgccgctgtaacctaatgccagcaatttttccgccagccatgggttacggccaaactgcttggtcatcagatacagttcaatgccgtaaagccgcgccgtctcaatcagtcgcttaccgttttccagtacctgatccacgtcgatcacccagctgtccggggcgatcttgccctgctgccacaaacttagtgcggcggaaatcagcgccgggttctggcgtttcaatgcttctacaaacatcttgttgcctcgtttctgttccttgaattaaatattcatttttttgaatatttaggttgtgcgacgtggatttgtcgggagcttcaaacctcttcgttagcagccatccataatccataaaggttggccagcaaatagccttcttcacacgggttaacttccagtgcgaattccttcaacaacacctgatgcaattgcacaacggcttgccagtggctggattgcgccagctctgccagcaattcgttatccagcggctctatttcttcaccacggcgactgcgcatcagtgcactcgccatatgtgtcatcgccatcgttccttgctcactgcgcaccggcagatggcactctgtttccagtacgttgacgacctgcatcatgcctttgcagatgtccttatcaataacgcctgcctcgcaaagcaggttgagtctggtttccatatcagatgcctttcgtttaataactcggttcctgttccccactcactacccgttgttgatgggcgagcagggcgtgtttatctacaacggcacgcagcagttgttgcattgggtaatcatcgactcgcgtcaggaccacggcttcggtggcctgtaaaaatcgcggatcgtctgtgagcggcgtcgcctctaatcccagcatggtcagttcgttttccgccaccacgttccagataaccgcatcgacatcgcctttaacaatgcgttgtaaactctcgtgataagagagatcgacacgttccacatcactatcgccaaaaaagacatcggtcatgattttctgatccgccgaacggttatccagccccacgcgcttcacgtttgcggactcgcctttacggcaaatcaactggtgctcgccaacgtaggtgtgcggccccaactccagcgcgaggcataaccctttttgcgtgagataactttccgccgccagtcgggaaaccaccgccatgtcatacacgccgttaagtaaacactccacgcgaatatccgcgccgcgcatatgcgcatagtaaaaaggaatgccatcaaactgagctttcagcccgctcgctaaaccttcgtacaagcgggtatagggcaaaggcatcgcacataccacgttgttgatatccacatgactcagcaatgctttgttatccatctcgaccagataactgccattgcgcccacggcgttcaatccgtatcgctccgcttgattccaacgttttcaacgcggcctgcgtcaggccaaccgatgaacggcattcagttgccagctcatctatggttttcagtcgattaccgcatttttcacccaacaaataacgggccagcgtcgtgatgacgacgccttcttttttgataaacgttcgacgcataatatattttcaataaaatgaatatttatatcttcattaaaatgaagataagtggcaacgacgagatgtggaaacggcgaggcgcttcacattttttcggattattgcaaatgaggataaaaaaaccgggtttccccggtttttggcattaatgttaaattacggcttcgccacaaaaccaatcgcttcgtacaccgctttcagcgtacgggaagcgtgtacactggctttttctgcgccgtctttcatcacctgttgcaggaaggcttcatcgttgcggaaacggtgatagcgttcctgcaattcagtcagcataccggaaacggcatcagccacttcacctttcagatgaccatacatcttgccttcgaactgtttttccagttctgggatgctctggcccgttaccgcagaaaggatatccagcaggttggaaacgcccgctttgttctgcacatcgtagcgaactaccggcggctcgtcggagtcagtgaccgcgcgtttgattttcttcactaccgatttcggatcttccagcaggccgataacgttattgcggttatcgtcagacttggacatcttcttggtcggctccagcagcgacattacgcgcgcgccagatttcggaataaacggctccggcaccttaaagatctcgccatacagcgcgttgaaacgctgggcgatatcgcgactcagttccaggtgctgtttctggtcttcacccaccggtaccagattagtttgatacagcaggatgtccgcagccatcagcaccggatagtcaaacagaccagcgttgatgttctcggcataacgcgcagatttatctttaaactgcgtcatgcgactcagttcgccgaagtaggtataacagttcagtgcccagcctaactgcgcatgttctggtacgtgggactgaacaaaaatggtgcttttctcaggatcgataccacaagccagatacaaggccagcgtatccagcgtcgctttacgcagcttctgtgcatcctggcgcacggtgatcgcgtgttggtcaacgatacagtaaatgcaatggtagtcatcctgcatgtttacccactgacgcagcgcacccatgtagttaccaatggtcaattcacctgagggctgtgcgccactaaaaacgatgggcttagtcatttttcgattcctgattttcgctatgcggaagccctaatgcgggcagaaggtcatttatagactgataaattacatcaggctggctgagatcgatagcctcgccgtagttatatccgtaggttaagccaactgatgggcaacctgccgcttttgccgcctgaatatcattgcgtgagtcgccgacaaacagcatctgttgtggggcaattcccatccgctcagccaccagtaacagcgggtccggatgcggttttttgttttgcacatcatcgccgccgataaccacgctaaagtatttggcaatatctaaggcttcgagcagcggtgcgacgaacggcgtcggtttgttggtgaccaggcctagcggcaggcctttagcctgcaacgcgcccaacgtatcggcaacgtgcgggaacaaaaacgtcccctcttcggcaacctcgccatagtagcgatcgaacagtttacgcagaatacgtacctgttcttctgccggaatgtcgtcatcaacgggcggtttacccattgttttacgctgagtcgcacgttcctgacgcgcccaggtcaatgcgcgctccatcagaacatctgcgccgttaccaatccaggtaataacgcgttcttcacctgcgatgggcaactccagcgcatacagcgccatatctaccgcagcagcaagaccgggagcactgtcgaccagcgtaccatcaagatcaaaagcgacgccgcgaatatcttcaaacttattcatgacttacctttgccagttcactgcgcatttcatcaatgacttttttgtagtctggctggtcgaagattgccgaaccggcgacgaacatatccgcgcccgccgcagcgatttcgccaatgttgttcaccttcacgccaccgtccacttccagacgaatgtcaaagccagactcgtcgatacggcgacgtacttcgcgcagtttatccagtgtttgaggaatgaaagactgaccgccgaaaccaggattgacggacatcagcaggatcacatccagcttatccatcacgtaatccagatagctcagaggtgtcgccgggttaaataccagacccgctttacagccattttctttaatcagttgcagcgtgcggtcaacatgctcggaggcttctggatgaaaggtaatgatgctggcaccagcggcagcgaaatcaggcacaatgcgatcgacgggtttcaccatcagatgtacgtcgataggggcggtaatgccatagttacgcaaggatttcagcaccattggcccaatcgtcagattgggaacatagtggttatccatgacgtcaaaatgcacgacatcagcgccagctgccagggcttttgcggtatcttcacccaggcgggcaaaatcagccgacagaattgagggggcaatcaaatactgtttcatccgcttctccttgagaattattttttcgcgggtgaaacgactcctggtttgtacaaagccagcagttcgtccacctttttacgtgtgccgccgttgctgcttatactgcgtcgaactttgacgacatgcaattttgcgcgctgataccactcacgcgttaacatcgtatcgtgattggagatcagcactggaatatggcgctcaaccagaccttcggcgatctccgccagatgcgcttgttgttcaagcgtaaaactgtttgtgtgatacgccgtaaagttggcggtcgcagacagcggtgcataaggcggatcgcaatagacgacggatgcatcatctgcgcgcgccatgctatcggcgtaagactcacaatagaaaaaggcattctgcgctttttcagcgaagtgatacaactctgcttccgggaaataggtttttttgtagcggccaaacggcacgttaaactcaccgcgcagattgtaacgacacaggccgttgtaaccgtagcggttcaaatataaaaacagtaccgcccgacggaacggatcctggcttttgttgaactcttcgcggaactgatagtaaacctcggcgcaatttgtttcgggaacaaacagctcgcgtgcggcctgtacgtactcatcagtacgcatcttcacaatgttatagagactgatcaggtcgctattgatatcggcaaggatataacgagaaaagtcggtgttgagaaacaccgacccggcacctacaaaaggctcaaccagacattcgcccttgggcaaatgccgtttaatatcatcaagcaggggatacttgccccctgcccacttcaaaaaagcgcgatttttcttcatgctgactaactaattacaccttctccggctgtggagaaagctccgacagcatccagcgcttcaggcagctcccgcaacgataaaccattgcgggagataaccttgattacttcagatcggcctgtacctgacgcagcggtttcgcccacgggtttttggcctgaacatctgctggcaatgtagataccgcttttttcgcctcttctttcgaagcgtacacgccagaaaccaggacataccacggctgaccattacgcgccgtttcatagacaacgtagtttttcagattctctttcttcgcccaaccgttcaggttgtcgtagttagaggaactgctcagctgcagagtgtaatggctggacggtgccgatttcaacgaaccaacattacctgcggtcttccctccagcggctggtgttgccgtggtttgcgccggggatgccgtctgtactggagccgtagtcgccgtctcttttggtgctggcgtagaagtcgcagtcggtgccttcgtgctcgccacaggggcagctggttcagtacgcttcggcgtctgtgctaccggcttcggctccgttttcacggttgcttgcggttttttcggttcaatcaccgcctgctgacgagctgggcgcgtagtggacggacgttcagcggtttgcgttttcgccgtgtcacgcgatgcattgccattgcgaacaggcgcgacagtcgcgggttcggtcggcaatgtggaattgaccgccacattgttcaactgttgctgattttgtggctgggtcagcgcattgttcaggtcaccctgcacttcaacacgttgttgaccatccgttgccgccggggtttgcccttgagtcggcgtagaagagatcggtggcagagaaacatcctgctgagtattttccgcagacgtggttcccggcgctggctgcaccccattcgcctgatcggtcgcattgcctgcaagatcaatactcttctcgccagacgcggtttgatcgctggaagaggtcgagggggcttttagcgcagaaccgataccgatgatcaacagcagtagaaccagaatgccgacgcccatcatcatatactgacgagaagcgggtttactggctgcttttttgcgcttacgcggacgacgctctacgcgctcttcatccacggtttcatcttcggattcgtcaatttcttcttcgatttccggttcctcattgcgctctttttgcgcacgagtcggacggcgatcgtcagtgtcatcaagttcaatatcatcaaaattgatctgcggttcgccacgttcagtacgctcagaacgttcagaagattgacgagaacgaccagtacgacgatcgctgggatcgggtttcagctcgtcttctggtttgaattcatccatttaacaccccactaaaaggttaatgcttaccacgttgcaattaacctgaagctaatagaccgcttgataagcggcctgacctttcttgttgttacgctgattgacaatcggcaatggcgttaagaacaagctcgtgcgaaacgccgctgcgaacttcactcttaccaattgccaacggaagaattaagcgtatctctcccgcaaggactttcttgtcacgcagcatatgcggtaaatacgcctgcgcggacatttcgcgcggcccattgaccggtaacccagcccgcttgagcagggttataatacgctgcgtttcggcagaactaaactgcccgagacgttccgacgtccgcgccgccatcaccatacccgcagcgaccgcttcaccatgtaaccaattgccataccccatttcagcttcaatggcatgaccaaaggtgtgtcccagattcagtaaagcacgtaacccggtttcgcgctcgtcggcggcgacaacttctgccttcagttcacaacaacggcgaatacagtacgccattgccggaccgtccagacgcaacaacgcatccagattctcttccagccagttaaaaaacgcaccgtcaagaataatgccgtatttgatgacttctgccagccccgacgctaactcacgcgggggaagcgttttcagacagtcgagatccaccaccactgaagcaggctggtagaacgcgccaatcatgtttttaccgaggggatggttgaccgcagttttgccgccaacggaggaatcgacctgcgacagtaacgtcgtcgggacttgaatgaaacgaacaccgcgctgataactcgccgccgcgaagccggtcagatcgcccactacgccgccgccaagcgccaccagcgtagtatcgcgaccatgcggcttttgtaacaacgccgtaaagacggtatcgagtacagccaggcttttatactgctcgccgtcagggaggataacgctatcgacattaacacccgcctgttcaagtacgccgcggaccttatcgagatacagaggagccagggtttcgttggtgaccaacatgacctgctcgcccgatttcagcggtaagaatgaagctggttcattaaacaaaccagatgcgatggtaattgggtaactacgttccccgagagtaacaacaatcctctccataacgcgacatccaccttaattactgtacccgcagacgagtgtatataaagccagaattagttgctttccagcatgtgaataatctggtttgcaaccactttagcgctttgatcatcagtacgaatggtcacgtcggcaatctcttcatacagcggattgcgttcattggccaacgcttccagaacttcacgtggcggtgtttcaacgtgcagcaacgggcgttttttatcacgctgcgtgcgtgcaagttgcttttcgatggtcgtttcaagataaacgacaacgccacgagcggaaagacggttacgcgtttcacgggatttcacagagccaccgccagtagccagcacaataccctgtttctcggtcaactcattgatgaccttttcttcgcgatcgcggaagccttcttcgccttctaaatcgaaaacccagcccacatcagctccggttcgtttctcaatctcttgatcggaatcgtaaaattccatattgagttgttgagctaactggcgcccaatagtgctttttccggcacccataggcccaaccagaaagatattgcgtttctctgccattttttcggtactactaagactattcgttaatgataaacccgcttcgctcagagagcgccgcaggacatgaactgaaacctcataagatattgcgagagtcagactgaaaattatctcaatactccagcgggtttggcaactgaataaatcacccatccctctgcatatctggtcgctgcaagcgcgctgccttgctaccaccgctctggcgataaatcaccgggtaagattagcgtaaaaaagacagcaaaatgccgcctgaatgataaatcatcatcatggaacgcaggcagcgaagagcaccaactctcaaatcggtactccttgtatgctaaatacctgcgcgcgtcaaatagatgaaacacgttcagcgtaaaaacattaccgcttttacggctgtttactcactggaaaccagtcgtggcgtgataaacaccactaactcgcgtcgttcatcttcttttccgtcatgacgaaataattgcccgaaccagggaatgtcgccaagcaacggtacgctatcctgacccgatttatttttacgggtaaaaatgccgcccagcgccaacgtttctccgcttttgacctcgacctgcgtttcgatctcctgcttatcaatcgccagcacttcgccatcggcctgctgtagcacctgccccggaacgttctggctgatgtgtaatttcagccggatgcgacctttttgtaacactgtgggcgtaacttccatccccaggacggcctctttaaattccaccgacgtcgcgccactttccccgctggaaacctgatatggaatttcgctcccctgtttaatgctggcaggctgaagatgtgaggccagcagacgcggactggcgataatatccagctgctgtttttgttcgagcgcggaaagctcaagatccagcaagcgtccgttgatgcgcccaatgttaaaaccgacatgcgttgtcgccgtcgctacggagaggtcgctaccaagcgtggtgacttgcccaacgccaccagcgtgttgcgcatcggccagcgtccatttcacgcctaactcacgcaaacttttttcattaatggtgacaatatgcgccgacagctcaacctgcccgaccggcagatccatttgcgctacccactgttcaagcgcgcttaacgccgttttgttatctcgtagcaaaaggcgattggtgcgtttatcgacggtcatactccctttggcactcagtagcttctcccccgctttcgccagttctcccgcgtcggcgtattgcagggttatactgcgattttccagcggcagatttgcctgcgcccgcgcctgctccgcctcctggcgggcgatattgttattctgccaggcaatggaatgcactgagagaatgttgccttcctgccgcgttatcagtccggcgcttttcactacagtttgtagtgcctgcttccagggaacatctgttagatgtaacgacaccgtaccgctgacgtctggcgacacgaccaggttcaacttctcctgttcagccagcgcctgcaacacctgagctaccggaacgtcatccaccatcagcgtcactttttgcggctttgccgcctgtacgccgggtatcagcatcaacagtagtgcggctatccattgcttcatttgtatctccttgccgttgccacaaccattgtggcggttcgcagtttgtcccggtacccagcgttagtacgtctggcgtcagctgtaaaattgtccagccgttttccagcacatcgttttgctgcacccgtcgccatttcttttgcccgtcttttattacaccgatgatgcgctcgcctcgccctaccatcccctgatagcgccactggctaagttcgctaatccggcatagatcttccggcggtttaaaagggtcacgcataccggttaaaaggcacaatacaatacctgccaacaaccagcgtttaaccctcatgcggcgtctccagttgtagcgtgaacaaaagatcatcaccttccacgcttaatgaaaaacggctcacgctgacgttgcgctctgccagccgtgtaaatgccgacggcactgcttcccacagcgttttcaacgccaactcgcctccctgcgcggatggatgccaggaaaccagttgcgcgccgggcaactgaaaatccagtggcgaaaagggcagcgttttttcttcgctgaagggagtggtgtcaaccaggcgatacagtgtggcccactgctggtgatgacttgcccgtagtcgaattaatgcgtcgcgctcttcatggtgtgtcgatgacagaaaaatgagcgtaactaacatcagcaaccagaatgcccagcaaaactggcggaggcggggtgatgtggcgaaccaccagtcaaagaacatgttcatcgctaaccttccttgttaactgatactcaaattgccagcgtccctgcgcatcctgctgcgtggctccccgctgattgagatgaaaagacgcatcctggcggagtgacgtttctagtgcgtttaacgcggtaatgcttgttgtcagccccttgatctccagcgttccctgctgccagcttatcgttgtcagccaggcgtgctcgggtaaaagcgccgccagtgcttccagcgcagattgccagtcgcgggtaaattgtcgctggcgctgccgttgcaaacgctgctcacgaatttgttggcgctccagcaaacgtggtttcgttatctgtaagctgcgggcgagttgttgttccgcctgaagcaaaacggtgtttacgcgtgcttcggcgttgtctgtcagacgcagtattagcgttatcccgacggccagcagcagaggcgcaacgaacatcagcaaccagaaacgaagaaaagcggtccggcgttgctgtcgccagggcaaaaaattaattggcgggttcatcagtacgccttcccaagcgccagccccagcgcgatggcaaagtctccacctggcggcggtagcggcggctgacgaacagaaacggcctcccagggatcaaatccgccttcgccacatatcgcgacgctttcgggatcaacggataacgctgccgccagctccttcgcgctagtcatccccaccgccagtttgcgcccccagcgacagcgtgtcgcccacagccactgttcgttatcacgccaggccagacattgctgatgagaaggtaaaaaaggcaggaatcgctgtaatgcactggcatccggggtgatcgcgctcacatgaacacgcaacctttctgccagagtgagtagcgttgccagctctttgctttgcgcggcagtcacgttataggcgggactgagtgagtcttcgctgtaatcgaaacgcagggagtccggatccatatccagctcgcgggccatcgtccctgacagccaggccgtttgctcccgctcaccgagggacatcgacgggcgcggaaatgaccgctgtaatgtgcgactggcgggaaacgccaacataatgtgatgacgctgcggcagttcgcgactccacggtaacaacgttttagccagccgctgcgcatcaacaatccgcccatctttgataatgtcgttctccagcggcaaccgccaccagcgttgcaaaaagcattcttttgcgccccgcacgatcgcaaccgctactgcttcttgctgttgtaaatgcaaaccaatttgccagatcttaaatgccattgtgatgatctccttatcacccgtcactctgacgggtatatcaatgcgtctggcttgcctttatactaccgcacgtttgtttataaactgcccaaatgaaactaaatgggaaatttccagtgaagttcgtaaagtattttttgatccttgcagtctgttgcattctgctgggagcaggctcgatttatggcctataccgctacatcgagccacaactgccggatgtggcgacattaaaagatgttcgcctgcaaattccgatgcagatttacagcgccgatggcgagctgattgctcaatacggtgagaaacgtcgtattccggttacgttggatcaaatcccgccggagatggtgaaagcctttatcgcgacggaagacagccgcttctacgagcatcacggcgttgacccggtggggatcttccgtgcggcaagtgtggcgctgttctccggccacgcgtcacaaggggcgagtaccattacccagcagctggcgagaaacttcttcctcagtccagaacgcacgctgatgcgtaagattaaggaagtcttcctcgcgattcgcattgaacagttgctgacgaaagacgagatcctcgagctttatctgaacaagatttacctcggttaccgcgcctatggtgtcggtgctgcggcacaagtctatttcggtaaaacggtcgaccaactgacgctgaacgaaatggctgtgatagccgggctgccgaaagcgccttccacctttaatccgctctactcaatggatcgtgccgtcgcgcggcgtaacgtcgtactgtcgcggatgctggatgaagggtatatcacccaacaacagttcgatcagacacgcactgaggcgattaacgctaactatcacgcgccggagattgctttctctgcgccgtacctgagcgaaatggtgcgccaggagatgtataaccgttatggcgaaagtgcctatgaagacggttatcgcatttacaccaccatcacccgcaaagtgcagcaggccgcacagcaggcggtacgtaataacgtgctggactacgacatgcgccacggctatcgcggcccggcaaatgtgctgtggaaagtgggcgagtcggcgtgggataacaacaagattaccgatacgctgaaggcgctgccgacctatggtccgctgctgcctgccgcagtcaccagcgccaatcctcaggaagcgacggcaatgctggcggacgggtcgactgtcgcattgagtatggacggcgttcgctgggcgcgtccttaccgttcggatactcagcagggaccgacgccgcgtaaagtgaccgatgttctgcaaacgggtcagcaaatctgggttcgtcaggttggcgatgcatggtggctggcacaagtgccggaagtgaactcggcgctggtgtcgatcaatccgcaaaatggtgccgttatggcgctggtcggtggctttgatttcaatcagagcaagtttaaccgcgccacccaggcactgcgtcaggtgggttccaacatcaaaccgttcctctacaccgcggcgatggataaaggtctgacgctggcaagtatgttgaacgatgtgccaatttctcgctgggatgcaggtgtcggttctgactggcagccgaagaactcaccaccgcagtatgctggtccaattcgcttacgtcaggggctgggtcagtcgaaaaacgtggtgatggtacgtgcaatgcgggcgatgggcgtcgactacgctgcagaatatctgcaacgcttcggcttcccggcgcaaaacattgtccacaccgaatcgctggcgctgggttcagcgtccttcaccccaatgcaggtggcgcgcggctacgcggtcatggcgaacggcggcttcctggtggacccgtggtttatcagcaaaattgaaaacgatcagggcggcgtgattttcgaagcgaaaccgaaagtagcctgcccggaatgcgatattccggtgatttacggtgatacgcagaaatcgaacgtgctggaaaataacgatgttgaagatgtcgctatctcccgcgagcagcagaatgtttctgtaccaatgccgcagctggagcaggcaaatcaggcgttagtggcgaagactggcgcgcaggagtacgcaccgcacgtcatcaacactccgctggcattcctgattaagagtgctttgaacaccaatatctttggtgaaccaggctggcagggtaccggctggcgtgcaggtcgtgatttgcagcgtcgcgatatcggcgggaaaaccggtaccactaacagttcgaaagatgcgtggttctcgggttacggtccgggcgttgtgacctcggtctggattggctttgatgatcaccgtcgtaatctcggtcatacaacggcttccggagcgattaaagatcagatctcaggttacgaaggcggtgccaagagtgcccagcctgcatgggacgcttatatgaaagccgttcttgaaggtgtgccggagcagccgctgacgccgcctccgggtattgtgacggtgaatatcgatcgcagcaccgggcagttagctaatggtggcaacagccgcgaagagtatttcatcgaaggtacgcagccgacacaacaggcggtgcacgaggtgggaacaaccattatcgataatggtgaggcacaggaattgttctgattaaaaaggcgcttcggcgccttttcagttggctgacaaagtgcatttgtttatgccggatgcgggtgaacgcgttatccggctaacaaaatcgtgaaaaatcaatatattgcaggaaccccataagcctgataatcgttgtgcatcaggcaaacttcacgcatttacactcgcccctgccctttcaaccattcgcgcacgaggaacagcgcgctgacattacgcgcttcgttgaagtcagggtcttccagcaaatccatcatatgcgccagcggccagcgcacctgtggtagcggctctggctcatcgccttccagcgattccgggtagagatcttgcgcgaccacgatattcattttgctggaaaagtaagacggtgccatgctgagcttcttcaaaaaagtcagatcgttcgcaccaaatccaacctcttcttttagctcgcggttagcggcttcgtagacgctttcacccggatcaattaatcctttcgaaaaacctaattcgtaggattcagttcccactgcgtattcgcggatcaggatcaggtgatcgtccacaatcggcacaatcatcactgcttcccggttggttggacgcattcgttcataaacacgccgcacgccattgctgaactccagatccacgctctcgacggtaaacagtcgggaatgggctacagtttcaacattcagaatggtgggtttttgtaatgatttgctcatcgtgggatctatgctgtgaaatcagcggttattgtgcgatatcggacacgctttcggcaatgtgaattgcatgttatttacatttatgtaacttaataaataattgtcctcaaatcaaattaaaagtcaataggttgaaataactccaggaatttgctgatatcccgccttcagagggtttgctatgatcagcggttactgtgatgtgcttaatgatgctcaagttaaactccacgcttgccgatagccaaccgcagaatcatgtattgtgtctggtgcgactgaccacgcctgacagactaagtaagatggggaaagcatgagcaccattgtgatttttttagctgctttgctggcctgctcactacttgcgggatggctgataaaagtgcgatccagacggcgtcagctgccctggaccaacgccttcgcggatgcgcaaacgcgtaaactcacacctgaagaacgtagcgccgttgaaaattatcttgagagcctgacgcaggtattacaggtgcctggcccaacgggagctagcgcggcaccgatctctctggcgctgaatgccgaaagcaacaacgtcatgatgctgacacacgctatcacgcgttacggcatctctaccgacgatccgaataaatggcgttactacctcgattcggtagaagtccacctgccccctttctgggaacaatacatcaacgatgagaataccgttgaactgatttataccgattcgctgccgctggttatttcactcaacggtcatacgctgcaggagtacatgcaggaaacgcgcggctatgccttgcaacctgttccgtccacgcaggcgtcgattcgcggggaagagagtgagcaaatcgagctactcaatattcgcaaagaaacgcatgaagaatatgcgctgagtcgtccgcgcgggctgcgtgaagcgttgctgatcgtcgcctccttcctgatgttctttttctgcctgattaccccggatgtatttgttccgtggctggcaggcggcgcattactgctgctgggcgcaggtctgtgggggctattcgcgcccccggcaaaatcctccctgcgggaaattcattgtctgcgcggtacaccccgtcgttggggattgtttggcgaaaacgatcaggaacagatcaacaatatttcactcggtattatcgacctggtctatcccgcacactggcagccatacattgctcaggatctcggtcaacaaaccgatattgatatctatctcgaccgccacgtagtgcgtcaggggcgatatctttcgctgcatgatgaagtaaaaaactttccgttacagcactggctgcgcagtacgattatcgctgcgggctcgctgctggtgctgtttatgctgttattctggatcccgctggatatgccgctgaaattcactctctcatggatgaaaggcgcacagaccattgaagccaccagcgtaaaacaactggctgacgctggcgtgcgggtaggcgatacattgcgtatcagcggtacgggaatgtgtaatattcgcacttccggaacctggagcgcgaaaaccaattcaccttttttaccgtttgactgctcgcagatcatctggaacgacgcccgctcattgccattaccagaatctgaactggtcaacaaagcgacggcattgactgaagcagttaatcgccagctgcaccctaaaccggaagatggatctcgcgtcagtgcctcattacgttcagcaattcaaaaatccggcatggtattgcttgatgattttggcgacattgtactgaagacagcggatttatgttctgccaaagatgactgtgtgcgactgaaaaatgcgctggtcaatctcggcaacagtaaagactgggacgcgctggtaaaacgcgccaacgccgggaagctcgatggcgtgaatgtgttattacgcccggtgagtgcggaatcgctggataacctggtggcaacctccaccgcgccgtttatcacgcatgaaacggcgcgagcggcacaatcactaaacagtccggcccccggcggattcctgattgtcagcgacgaaggcagcgattttgttgatcagccctggccttcggcatcactttacgactacccgccgcaagaacagtggaacgctttccagaaactggcacaaatgctgatgcatacgccgtttaacgccgagggtatcgtcacaaaaatcttcactgacgccaatggtacgcagcatattggccttcatccaatcccggatcgttccggcctgtggcgctatctcagcaccacattgctgctactgacgatgctgggtagcgccatttacaatggcgtacaggcctggcgtcgttaccagcgtcatcgcactcgcatgatgaagattcaggcctattatgaaagctgcctgaacccgcaactgatcaccccttcagaaagccttatcgaataacacgtttgcgcggcaggttatgctaccctgtcgcgcaaattgcttcactctggagatttccctcatgcatatcaacattgcctggcaggacgtagataccgttctgctggatatggacggcacgttgctcgacctcgccttcgataactatttctggcaaaagctggtgcctgaaacatggggcgcgaaaaacggggttacgccacaggaagcgatggaatatatgcgccagcaatatcacgacgtacagcatacgctaaactggtactgtcttgattactggagtgagcaactgggtctggatatctgtgcgatgaccaccgagatgggaccgcgtgccgtactgcgtgaagataccattccgtttcttgaggcactgaaagccagcggtaagcagcgaattttgctcaccaatgcgcatccgcacaacctggcggtaaaacttgagcataccggtctggacgcacaccttgatttattactttccacccacacatttggttatccgaaagaggatcagcggttatggcatgcggtggccgaagctacgggtctgaaagctgaaagaacgctgtttattgatgacagcgaagcgattctcgatgctgccgcgcaatttggtattcgttactgcctcggcgtgactaatcctgattccgggattgccgagaaacagtatcaacgccatccgtcactgaatgactaccgccgcctgatcccctcgctaatgtgaaggagacgccatgaaagaaaaacctgctgttgaggttcgactggataaatggctatgggctgcccgtttttataaaacccgcgcgctggcccgtgaaatgattgaaggcggtaaggtgcattacaacgggcagcgcagcaagccgagcaaaatcgtcgagctgaatgccacgctcactctgcgccagggaaatgacgaacgcacggtgattgtaaaggcgattactgaacagcgtcgccccgccagcgaggcagccttgctgtatgaagagactgcggaaagtgtagagaaacgcgaaaaaatggcgctggcacgtaaacttaatgccttaaccatgccgcacccggaccgacgcccggacaaaaaagagcgccgcgacctgttacgatttaaacacggcgacagtgaataactgtcacctgcaagagagatgattatgccgcaacatgaccaattacatcgctatctgtttgaaaactttgccgtgcgcggcgaactggtaaccgtttcggaaaccctgcaacagatccttgagaatcacgattatccgcagcccgttaaaaacgtgctggcagaactgctggttgcgaccagcctgttaaccgctacgctgaagtttgatggtgatatcaccgtacagctgcaaggcgacggtccgatgaatctggcggttattaacggtaacaataaccagcaaatgcgcggtgtggcgcgcgtgcagggcgaaattccagaaaatgccgacctgaaaacgctggtcggcaatggttacgtggtgatcaccattaccccgagcgaaggcgaacgctatcagggcgtggttggtctggaaggtgataccctggcggcctgcctggaagattactttatgcgttctgaacagctgccgacgcgcctgtttattcgcaccggcgacgtagacggcaaaccggctgcaggcggtatgttgttgcaggtaatgcctgcgcaaaatgcccagcaggacgactttgaccacctggcgacgctaaccgaaaccatcaaaaccgaagaactgctgaccttaccggcaaacgaagtgttgtggcgtttgtatcacgaagaagaggtgacggtttacgatccgcaggatgtggagttcaaatgcacctgctcgcgtgaacgttgcgccgacgcgctgaaaacgctgcctgatgaagaagtcgatagcatcctggcggaagatggcgaaattgacatgcattgtgattactgcggtaaccactatctgttcaatgcgatggatattgctgaaatccgcaacaacgcgtctccggcagatccgcaagttcattaatgagtatgtccggcagagagggctctgccggattttacgacgtaatggcctgatgtgctgcgcttaccaggcctgtgaaataaatcgcaaattattgttggtcagatacagcgtcgtatccgttaaaagagttgtcacttacttaagtttatttccagcgtttcaccatctaccgtcagatccagttttccatccttcgcagctgtgagtaatttttctttcgttatttcgttcggaagtaaactcatatcaagcgcgtcccattcttttctgtctgagtcaaagccatagacaatgactctgtcatcattaaaagcaaacaggatccgctccgcctgaccatcactattcagatcttgctcgaccaggacgcaggcgtctttttcaatacaggtcatcacgttatagcgatcctggattaaggccgaccagaatgtcgcatccggtttaacagaaccaggagcaattaacacattttcggctaatactttttccgatacctgttcctgaagatgttgctctccatctaacgccatcagcagatcccgcgcgcgtttcgggtctttcataaacccggcatcgcttttcagcgactcaagcgccgcacgtccatagcgaccgctctgttcgagcatgtagatagttacctggtctggcgtgtttttgccgctctgataacgcgccatatgactgttcacgctaatgcgcatactgtccagcaccggcgaattaagaagcaccagtatcaccaacaccaataacgaaaccgcaaggttcactttgccctgaagaacaaggggattttgcccattacgccagacgatactgacaaaataccccagcgaccacaccagtaacaccagcaccgccagcgcgccctgcaagcggtcgacagtccagccgtactgagcgacccgcagccataacgcccaggcggcgacgaacacatacagcggagcaaccagcaaagcggttttaatcaggcaacgcaacggccccgtccagggaagtgacgctttttgcggatcgcggacaatagccattaagatcaattgcaaaaaggccagcgttaacagcaacccggcggcggagatgtggcgagaaatcgcgctcaggtccgtaaacggcagggtgatgataaacatcagggttagcaatgatactaacggcagcaaccccgtggcgattagcgtgaacaacttttgaatagagtcgattaaacgtgactgtgtacgcgcgaggatcaccaccagtgcggtaaccagaccaaatgtaagatacataaaccagtcggttgcaaaaaagagcgtattgaaaaacgtgatgccaacaagtttaaacaactcaccccacagtaaaagcaccagccacgtcaggccattggagagaaaaatcaccagtaatataagtacgttatgccatactgactggtaaaagtagctatagcggctactgccattgcggatacgaaggctttgttgtatccacggtagcaacaacattgccatcaacagcagatatcagccaaaatcccaaatcgccttttcagctctccaggggttcatgccatcagtttgccacttcagccaaccgctcatccctgtcgtggcaataaacaccagcgccagccatccccaaaggcgcttctgtttaaaagagatcacggagaagagtaaaacggatgaaaacgcgacggtcgcaggcacgccataaacaatccaactgtgattttttccggcaagccaggcgataagcaggtagcaaaccagcccctgaagtaatccggtagcaatcatcccccagcgtgttgccggtgaaagttcaacgttatccatgttggttatccagaatcaaaaggtgggttaattatcgcatccgggcagtagtattttgcttttttcagaaaataatcaaaaaaagttagcgtggtgaatcgatactttaccggttgaatttgcatcaatttcattcaggaatgcgattccactcacaatattcccgccatataaaccaagatttaaccttttgagaacattttccacacctaaaatgctatttctgcgataatagcaaccgtttcgtgacaggaatcacggagttttttgtcaaatatgaatttctccagatacgtaaatctatgagccttgtcgcggttaacacccccaaaaagactttactattcaggcaatacatattggctaaggagcagtgaaatgcgcgttaacaatggtttgaccccgcaagaactcgaggcttatggtatcagtgacgtacatgatatcgtttacaacccaagctacgacctgctgtatcaggaagagctcgatccgagcctgacaggttatgagcgcggggtgttaactaatctgggtgccgttgccgtcgataccgggatcttcaccggtcgttcaccaaaagataagtatatcgtccgtgacgataccactcgcgatactttctggtgggcagacaaaggcaaaggtaagaacgacaacaaacctctctctccggaaacctggcagcatctgaaaggcctggtgaccaggcagctttccggcaaacgtctgttcgttgtcgacgctttctgtggtgcgaacccggatactcgtctttccgtccgtttcatcaccgaagtggcctggcaggcgcattttgtcaaaaacatgtttattcgcccgagcgatgaagagctggcaggtttcaaactagactttatcgttatgaacggcgcgaagtgcactaacccgcagtggaaagaacagggtctgaactccgaaaacttcgtggcgtttaacctgaccgagcgcatgcagctgattggcggcacctggtacggcggcgaaatgaagaaagggatgttctcgatgatgaactacctgctgccgctgaaaggtatcgcttctatgcactgctccgccaacgttggcgagaaaggcgatgttgcggtgttcttcggcctttccggcaccggtaaaaccaccctttccaccgacccgaaacgccgcctgattggcgatgacgaacacggctgggacgatgacggcgtgtttaatttcgaaggcggctgctacgcaaaaactatcaagctgtcgaaagaagcggaacctgaaatctacaacgctatccgtcgtgatgcgctgctggaaaacgtcaccgtgcgtgaagatggcactatcgactttgatgatggttcaaaaaccgagaacacccgcgtttcttatccaatctatcacatcgataacatcgttaagccggtttccaaagcgggccacgcgactaaggttatcttcctgactgctgatgctttcggcgtgttgccgccggtttctcgcctgactgccgatcaaacccagtatcacttcctctctggcttcaccgccaaactggccggtactgagcgtggcatcaccgaaccgacgccaaccttctccgcttgcttcggcgcggcgttcctgtcgctgcacccgactcagtacgcagaagtgctggtgaaacgtatgcaggcggcgggcgcgcaggcttatctggttaacactggctggaacggcactggcaaacgtatctcgattaaagatacccgcgccattatcgacgccatcctcaacggttcgctggataatgcagaaaccttcactctgccgatgtttaacctggcgatcccaaccgaactgccgggcgtagacacgaagattctcgatccgcgtaacacctacgcttctccggaacagtggcaggaaaaagccgaaaccctggcgaaactgtttatcgacaacttcgataaatacaccgacacccctgcgggtgccgcgctggtagcggctggtccgaaactgtaatgatttgaagctggagaatatctatccagtatcttatagaaagcaaaacgggaggcaccttcgcctcccgtttatttacccttcttttgtcgtgccctgcgcccgcgttaccggcactggcagccaggcgcgaatggaaagcccgccccgctcgctggtgccaagctccagcatcccgttatggttatccacgatacgctgcacaattgccagccctaatcccgtgccgctaatggtgcgcgcactgtcgccgcggacaaacggctggaacaggtgcttacgttgttccggcgcaattcccggaccgtcatcttccacctggaaccaggcgcgattcggctccgttccgctgctgactttgatccagccattgccataacgagcggcgttgaccaccatattcgccaccgcgcgtttgatcgacagcgggtgcattttcacttcaatgctgccggggtaaagcgcggtttcaatttcccgctcatagccactttcggcagcaatcacctcaccgagcactgcattaagatccgccatttccatcggcatctcctgcccggtgcgcaggtagtcgataaactgctcaatgatggcgttgcactcttcgatatctttattgatcgattctgccagatagccatcctgctcgctcatcatctcagtcgccaggcgaatacgcgtcagcggcgtgcgcaagtcgtgacttacccccgccatcagcagcgtgcggtcatccgccagttgcttaacaccagccgccatatggttaaaggcgcgggtaacggaacgcacctcggacgcgccatactcacgcagcggcggcggaataatccctttaccgacctgcaaagcagcatgttcgagatcgaccaacggtcggttctggatacgaataaacagccacgccccgcctatcgccaatagcataatcgccagcgtatagcggaacagcggagagaaatcgccctgatgaatttcggtcagcggcacgcgtacccagatattgggcgacagccaggttttcagccagacgacaggcgaacttttgttgacctcaacgcgcacttccgtcgggccgcccagttgctgtgccatctgatggcttaagaattcatagtgttgcgcccaacgcagacctgcctcttcggcagcctcgttggagtagagagagatccccagctcacggtagatctcccgacggaaagcgggaggcacaaccaactgcgtgccgtcctccagttgcagtttgtcggtcatcaacatacgcacttcgtacgcgaggactttattaaactgctggaggctcggcaaaatcgcgaagttcagcaccaccagataagtcgtcaccaggctggcgaacagcaaggtgacgatgagcaataacgtacgggcaaatgaacttcgtggcgagaagcgcaatcgcctcatgctttagagccgtccggtacaaagacgtagcccaggccccaaacggtctgaatgtaacgcggatgcgctggatcttcttctaccatgcggcgcagacgcgaaatctgcacgtcgatggagcgttccattgcggaatattcacgaccacgggcaaggttcatcagcttatcgcgggagagcggctcacgcggatggctgaccagtgccttcagtaccgcaaactcaccgctggtgagcggcatcggctcatcttcgcggaacatttcgcgcgtaccgaggttaagtttgaacttaccgaaagcaattaccgcctcttcctgtgacggtgcgcctggcagttcgttcgcctgacgacgcagcaccgcacgaatacgggccagcagttcacgcgggttaaacggttttggaatgtagtcgtcagcgccaatctccaggcctacgatacggtccacttcttcccctttcgccgtcaccataatgatcggcatcgggttgctctgactacgaagacgtcggcaaatcgacaagccatcttcaccaggtaacattaaatccagtaccataagatggaaagattcacgagtcagcaggcgatccatctgttctgcattagcgacgcttcgaacctggaagccttgttcggtgagataacgttccagcagcgcacgcaggcgcatgtcgtcatcgaccaccagaatcttgtagttctcttgcattgtttgtactcccaaaggttcgcaacaatttgtaagcgtgtattcttaaaaaagctcacgttcgtcaccagctaaatctggtatgaatttcagcctaaattgttacaaagcatattaaacagcagcttaagtatacaatttattcggcgaaacattattgattctgttgatatgatcacgttatacccaatgtgcgcattatcaaacagacaaagggaatcaacgagatgaaaacgcccctggttacccgggaagggtatgaaaaactcaaacaagagcttaattatctctggcgtgaagaacgcccggaggtcacaaaaaaggtgacctgggccgcaagtctgggcgaccgcagcgaaaatgctgactatcagtataataaaaagcgtctgcgtgaaatcgaccgtcgcgtgcgctatctcactaaatgcatggaaaatctcaaaatcgtcaattactcccctcagcaggaaggcaaagtcttttttggcgcgtgggtggagattgaaaacgacgatggcgtgactcaccgtttccgtattgtcggctacgatgaaatttttggccgtaaagattacatctctatcgattccccgatggcccgcgcattgctgaaaaaagaagtcggcgatctggcggtggtgaatacccctgccggggaagcgagctggtatgttaatgctatcgaatacgtgaaaccgtaatgaagagtcttaacctcctgccgatggctggcatttttgccagccagtccgtataactatcccctgatttttgatccgaaaagatgaactcaaaccatgatgaatgattcgttctgccgcattattgcgggtgaaattcaggcgcgcccggaacaggttgacgctgccgttcgcctgcttgacgaagggaataccgtgccgtttatcgcacgttatcgtaaggaaatcaccggcggtctggatgacacgcagctgcgtaatctggaaacgcgtctgagctatctgcgcgagctggaagagagacgtcaggcgatcctcaagtccatttccgagcaaggcaaactcaccgatgatctggcgaaggccatcaacgccaccctaagcaaaaccgaactcgaagacctctacctgccctacaaacctaaacgccgcacccgcgggcaaatcgccattgaagcagggcttgagccgttggctgacctgctgtggagcgatccgtcacacacaccagaagtcgccgctgcgcaatatattgatgccgataaaggcgtggcagataccaaagccgcgctggacggcgcgcgctatatcctgatggaacggtttgccgaagatgccgcgctgctggcgaaagtgcgtgattatctgtggaagaacgcgcatttggtttctacggtggtgagcggtaaagaagaggaaggggcgaaattccgcgactatttcgatcatcacgaaccgttgtccacggtgccttctcaccgcgcgctggcgatgttccgtgggcgtaacgaaggcgtactccagctttcgctgaatgccgatccgcagttcgatgagccgcccaaagagagctattgcgagcaaatcatcatggatcaccttggcctgcgcctgaacaatgccccggcggatagctggcgcaaaggcgtagtgagctggacctggcgcatcaaggtgctgatgcatctggaaaccgaactgatgggtaccgtgcgcgaacgcgcggaagatgaagcaatcaacgtctttgcccgtaacctgcacgatctgctgatggcggcccctgccggactgcgtgcaacgatgggcctcgatccgggtctgcgtaccggggtaaaagtggcagtggtcgatgccactggcaaactggtggcgaccgataccatttacccgcacaccggacaagccgcaaaagtagcgatgaccgttgctgccttgtgtgaaaaacataacgttgaactggtggcgatcggcaacggtacagcttcccgcgaaactgaacgtttctatctcgacgtgcagaagcagttcccgaaagtgaccgcacagaaagtgatcgtcagcgaagctggcgcgtcggtttactcagcttccgagctggcagcgcaggagttcccggatctcgacgtttcgctgcgtggtgcggtatctatcgcccgccgtttgcaggatccgctggcggagctggtgaaaatcgatccgaaatctatcggcgtaggtcagtatcagcatgacgtcagccagacgcaactggcccgcaaactggatgcagtagtagaagactgcgtaaacgccgttggcgtcgatctcaacaccgcttctgttccgctattaactcgcgtggcgggcctgacgcgcatgatggcgcaaaacatcgtggcctggcgcgatgagaacggccagttcaagaaccgtcagcaactgctgaaagtcagccgtctggggccgaaagccttcgagcagtgcgcgggcttcctgcgcattaaccacggtgataacccgctggacgcctctaccgttcacccggaagcctatccggtggtggaacgcattctggcagcaacacagcaggcactgaaagatctgatgggtaacagcagcgaactgcgtaacctgaaagcgtctgactttactgatgaaaaattcggtgtgccgacagtaactgacatcatcaaagagctggaaaaaccgggtcgcgatccgcgtccggaatttaaaaccgctcagtttgccgatggcgtcgagacaatgaacgacctgcaaccgggtatgatcctcgaaggcgctgtcaccaacgtcaccaactttggcgcgtttgtcgatattggcgtgcatcaggacggcctggttcacatctcttcattgtcgaacaagtttgtggaagatccgcataccgtggtgaaagcgggcgacattgtgaaggtgaaagtgctggaagtggatcttcagcgtaaacgtatcgccctgaccatgcgtctggacgagcagcctggcgaaaccaacgcccgtcgcggcggcggtaatgaacgcccgcaaaacaaccgcccggcagccaaaccacgcggtcgtgaagcgcagcctgccggtaatagcgcgatgatggatgcgctggcggcggcaatgggcaaaaaacgttaaacgcccggactggcccctaaacctgcgcgataaggcgttcacgccgcatctggcaacgaacgccttgcctgacataaaagtgccggagaatatctccggcctttttattccacaaccaaactcataatatattccggcaatatttatcacttcattaacaactgaaaccttaattaaacattagccagtccgggtaattcactattcgaattatattttcgctgcgatataaccttgagccacatcaacattgagtcagattattattcaaaccaacattcgcacacattttaagtattgctgatagaaaccattctcattatcattgtgttgttgattatttaatctctcctttgttggcaaatcatctggtctcatgtcgctgtcaaacgccccatgaggtagttatccagttaatgagaaacaagtaggcacctatgcaatacactccagatactgcgtggaaaatcactggcttttcccgtgaaatcagcccggcatatcgccaaaaactgctttctcttggcatgttacctggctcctcttttaatgtggtgcgcgtcgctccactcggcgaccccattcatatcgaaacccgtcgtgtgagcctggtattacgcaaaaaagatctggccttattagaagtggaagcggtttcctgttaatacggtgataacaacaatgaaaaaattaaccattggcttaattggtaatccaaattctggcaagacaaccttatttaaccagctcactagcgcacgtcagcgtgtaggtaactgggctggcgttaccgtcgaacgtaaagaagggcaattctccaccaccgatcatcaggtcacgctggtggacctgcccggcacctattctctgaccaccatctcatcgcagacctcgctcgatgagcaaatcgcctgtcactacattttgagtggcgacgccgacctgctgattaacgtggtggatgcgtctaaccttgagcgtaacctgtacctgacgctacaactgctggaactcggcattccctgcatcgtggcactgaacatgctcgacattgccgagaagcaaaatattcgtattgaaattgatgctctgtcggcgcgtcttggctgcccagtgatcccgctggtttcaacccgtggtcgcggtattgaagcgctcaagctggcgattgatcgctataaagctaacgagaatgtggaactggtgcattacgcacagccgctactcaacgaagcagattcactggcaaaagtgatgccttccgacatcccgctgaaacaacgtcgctggctgggcctgcaaatgctggaaggcgatatctacagccgcgcctacgccggtgaagcgtcgcagcatctggatgccgcccttgcccgtctgcgtaatgaaatggatgatccggcgctgcacattgccgatgcgcgttaccagtgcatagctgccatctgtgatgtggtaagcaacaccctgacggcagaacccagccgtttcaccactgcggtagataaaatcgtgctcaaccgtttcctcggtctgccgattttcctctttgtgatgtacctgatgttcctgctggctatcaacatcggcggggcgttacagccgctgtttgacgtcggctccgtggcgctatttgtgcatggtattcaatggattggctacacgctccacttcccggactggctgactatcttcctcgcccagggcctgggtggcggtattaacaccgtgctgccactggtgccgcagatcggcatgatgtacctgttcctctccttccttgaggactccggctatatggcgcgtgcagcgtttgtgatggaccgcctgatgcaggcgctgggcttgccggggaaatcctttgtgccgctgatcgtcggtttcggttgtaacgtaccgtcggtaatgggcgcacgtacgcttgatgcaccgcgtgaacgtctgatgaccatcatgatggcaccgtttatgtcctgcggcgcgcgtctggctatcttcgcagtattcgcggctgccttcttcgggcagaacggtgccctggcggttttctcgctgtatatgctcggtatcgtgatggcggtgctgactggcctgatgctcaagtacaccatcatgcgcggtgaagcgacgccgtttgtcatggagctgccggtctaccatgtaccacacgttaaaagcctgattatccagacctggcagcgtctgaagggcttcgttctgcgtgctggtaaagtgattatcatcgtcagcattttcctgagcgctttcaacagcttctcgttgagcgggaaaatcgtcgataacatcaacgactcggcgctggcgtccgtcagccgggtgataacccctgtcttcaagccgattggcgtacatgaagataactggcaggcaacggttggcctgtttacgggcgcaatggcaaaagaagtggtggtgggtacgctcaacaccctctacaccgcagaaaatattcaggacgaagagttcaatccggcggaattcaacctcggtgaagagctgttcagtgcggtagatgaaacctggcagagcctgaaagacaccttcagccttagcgtactgatgaaccccattgaagctagcaaaggcgacggtgaaatgggtaccggggcgatgggcgtgatggatcagaaattcggtagcgcagctgccgcatacagctacctgattttcgtcctgctgtatgtaccatgtatctcggtgatgggagccatcgcccgtgaatcaagccgtggctggatgggcttctccatcctgtgggggctgaatatcgcttactcactggcaacattgttctatcaggtcgccagctacagtcagcacccaacttacagcctggtgtgcattctggcggtaatcctgtttaacatcgtagttatcggtctgctgcgccgcgcgcgtagccgggtggatatcgaactgctggcaacccgcaagtcggtaagcagttgctgcgcagccagcaccaccggtgattgccattaatggcttcacttattcaggtacgtgatttgctggcgttacggggccgtatggaagcgacccagataagccagacattgaacactccgcagccaatgattaacgccatgctgcaacaactggaaagtatgggcaaagccgtgcggattcaggaagaacctgacggctgcctctctggcagttgtaaaagctgcccggaaggaaaagcctgtctgcgcgagtggtgggcgctgcgttaaccttactccatcgcctgttttggaaagcccggtatgcgtctgcatccgggcttttttgcgtgcggctttccataaaaatgcaactcttgcagcacggcgtaagttcctttgaaagcatctcgcagggatgaaaactcgctaatgcacaggtgtggagtggcgcgtagagtcgcggcattcaaacaacaggtgaaggaacgccatgagcaaaaagcagagttccaccccacacgatgcgctgttcaaactctttttacgccaaccggacacggctcgtgattttcttgcgtttcatttaccggcacccattcacgcgctttgtgatatgaaaaccctcaagctggagtcgagcagctttattgatgacgatctgcgtgaaagctattccgatgtgctgtggtcggtgaaaacggaacaaggaccaggatacatctattgtctgattgaacatcaaagcacctcaaacaaactgatcgcatttcgcatgatgcgttacgctattgccgcaatgcaaaatcaccttgatgctggatacaaaacgttgccgatggtggtgctattgttgttttaccacggtattgaaagcccctatccctattcgctgtgttggctggattgtttcgccgatcccaaactggcaaggcagctttatgcctccgcatttccgctgattgatgtcaccgtcatgcctgatgatgaaatcatgcagcaccgacgtatggcgctgctggagttaattcaaaaacatattcgtcaacgcgacctgggtaatgactccaacttattgatagtgttttatgttcagataatgcccgatgactttgtcatgcagctccaccgattttgagaacgacagcgacttccgtcccagccgtgccaggtgctgcctcagattcaggttatgccgctcaattcgctgcgtatatcgcttgctgattacgtgcagctttcccttcaggcgggattcatacagcggccagccatccgtcatccatatcaccacgtcaaagggtgacagcaggctcataagacgccccagcgtcgccatagtgcgttcaccgaatacgtgcgcaacaaccgtcttccggagactgtcatacgcgtaaaacagccagcgctggcgcgatttagccccgacatagccccactgttcgtccatttccgcgcagacgatgacgtcactgcccggctgtatgcgcgaggttaccgactgcggcctgagttttttaagtgacgtaaaatcgtgttgaggccaacgcccataatgcgtgcagttgcccggcatccaacgccattcatggccatatcaatgattttctggtgcgtaccgggttgagaagcggtgtaagtgaactgcagttgccatgttttacggcagtgagagcagagatagcgctgatgtccggcagtgcttttgccgttacgcaccaccccgtcagtagctgaacaggagggacagctgatagaaacagaagccactggagcacctcaaaaacaccatcatacactaaatcagtaagttggcagcatcacccgcgacctgatggggctggtagagcaaatggcctgcttattaagtagtggatacgctaatgacagacaaatcaaagggctgtttaattacatactgcaaaccggcgacgcggtacgttttaacgattttatcgacggcgttgccgaacgttcaccgaaacacaaggagagtttaatgacaattgcggaaagattgcggcaggagggggaacaatccaaagccctgcatatagccaaaataatgcttgaatccggagtccctcttgcggacatcatgcgctttaccggggtgtcagaagaagagttggctgcggcgagccagtaaatttctgtctcgccatttcaaaagttgcctacaccctctgcttcaacgccaccagcaggtgacaaaactcgaccggatgcgaaataaacggcgcatgggccgctttggcgaagatatatgatttgctgcgaggccagagtttatccagcatcggcaccactttgcgcggcaccagaccatcgagatagccatacaatcgcaaaaacggcatgggcacgttttgcagcggctgacggagatcaaccgttttcaggatttccagcccgccattaagcacgtcaacctccggcatcggtaacgccagaacggttttcttcaacgcccgcgcatcctggcgcgccgtttcagtccccatggtttgtaacgccaggaaccgctccactgtacgctgaaaatcatcactgagttgctgctgaaatcccgccagcacgtccggttttatccccggccaatcgtcacgagcactaaaacaaggtgacgacgccacggtgaccagcgcctgaacacgctcgggatgggttaacgcaatctggcttgccaccagcccgcccagactccagcctaaccaaatggctttatcaggtgcctgttgcagcacggcttcggccatatcagcaagtgacagcgcaccaaatccctggctgcgcccgaagccgggcagatcaacaaggtgcagcgtaaaatgcgagctaagttcctcgtcaatgcaacgccacacttcggcattcagtccccatccgtgcagcagcacaagatgaacattcccctgacctttggtctgccaccaaatgttattcatccgctattgttctcttttgacttacaaggatgaacatatgctaacagtaccgggattatgctggctatgccgaatgccactggcgttaggtcattgggggatttgttcggtctgttcacgcgccacccgcacagataaaacgttatgcccacaatgtggattacccgccacacactcccatcttccctgcggtcgctgcctgcaaaaaccgccgccctggcaaagactggtcacggttgccgactatgcgccgccgttaagtctgctcatccaccagcttaaattttcccggcgcagtgaaatcgccagcgccctgtcacgtctgttactattggaagtcttacacgctcgtcgcaccaccgggttgcaattgccggatcgcatcatcagcgttccgttatggcagcggcgtcactggcgtcggggatttaatcagagcgatttgctgtgtcagccgttatcacgctggttgcactgccaatgggatagcgaagccgtcacacgtacacgggccactgcgacccagcattttctcagtgcccggctgcgcaagcgcaacctgaaaaatgcctttcgtcttgaattgcccgtgcaaggtcgccatatggtgattgtggatgatgtcgttaccaccggaagtaccgtcgcagagattgcgcagttgcttttacgcaatggtgcggcgactgtccaggtctggtgcctttgtcgaaccttgtagagcctcgatgatgggcgtattataaccaactaaaatagtcaactattaggccattactatgatccgtatttccgatgctgcacaagcgcactttgccaaactgctggcaaatcaggaagaagggacacaaatccgcgtatttgtgattaaccctggcacgcctaacgctgaatgtggtgtttcttattgtccgccggatgccgtggaagccaccgacactgccctgaaatttgacctgctgaccgcgtatgttgatgagttaagcgcaccatacctggaagatgcagagatcgactttgttaccgaccagttgggttctcagttaacgctgaaagccccgaacgccaaaatgcgtaaagtggcagacgatgcaccgctgatggagcgcgtggagtatatgctgcagtcgcagatcaacccacagcttgctggtcacggtggtcgcgtttcgctgatggaaatcaccgaagacggttacgccattctgcaatttggcggcggctgtaacggttgttccatggtcgatgtgacgctgaaagaagggatcgagaagcagctgctgaacgaattcccggagctgaaaggtgtgcgcgatctcaccgaacaccagcgcggcgaacactcctactactaagttatcccctcttttgtagattgcccgatgcgacgctaaagcgtcatttcgggcctacgttgaacatgtgccagacgttggcacagcattgctttggcaaatccctcccttcgtttccccgcgataatatgaccaacctctcataatttaaatttaccccgctctggtgattctcaaacgccaaatgttacccgtatcattcacatgggtaccaaacatactcctgacatctgactacaataattagttttagtgggtatcagtcgtggtgccgcaatatctctgttcccgattgggataattagagtttgtcgtcagaaaattgacgttacccataacaaatgaaaggccaggtaaatcatgccattagtcattgttgctatcggtgtaatcttgttgttgctcctgatgatccgcttcaaaatgaacggcttcatcgctctcgtcctcgtggcgcttgctgttggattaatgcaaggaatgccgctggataaagttattgactccatcaaagtcggtgtcggcgggacgctcggtagccttgccctgatcatgggttttggcgcaatgctgggcaaaatgctggcagactgcggtggcgcacaacgtatcgccaccacgctgattgccaaatttggtaaaaagcacatccagtgggcggtggtgttaaccggttttaccgttggttttgccctgttctatgaagtgggcttcgtgctgatgctgccgctggtgtttaccatcgcggcttccgcgaatattccactgctgtatgttggtgtaccaatggcggctgcactgtctgtgacccacggcttcctgccaccgcatccgggcccgactgcgattgccaccattttcaatgccgatatgggtaaaaccctgctgtacggtactattctggcaatcccgaccgtgattctcgccggtccggtttacgctcgcgtgttgaaaggtatcgataagccaatcccggaaggtctctacagcgcgaaaaccttcagcgaagaagagatgccgagctttggcgtcagcgtctggacttctctggtgccggttgtgctgatggcgatgcgtgcgattgccgaaatgatcctgccgaaaggtcacgctttcctgccggtagcggagttcctcggtgacccggtaatggcaacgctgattgccgtgctgattgcgatgttcacctttggtctgaaccgtggtcgttcaatggatcagattaacgacacgctggtttcttccatcaaaatcattgcgatgatgctgttgatcatcggtggtggcggtgcgttcaagcaggtgctggtagacagcggcgtggacaaatacattgcttccatgatgcacgaaaccaacatttctccgctgctgatggcctggtcgattgctgccgtactgcgtatcgcgctgggttccgcaaccgttgcggcaatcactgcgggtggtatcgcggcaccgctgattgcaacgacgggtgttagcccagagctgatggttattgcggtgggttccggtagtgtgattttctctcatgtgaacgatccgggcttctggctgttcaaagagtactttaacctgactatcggcgagaccatcaaatcctggtcgatgctggaaaccattatctcggtgtgcggtctggtaggctgtctgctgctgaatatggtgatttgataacactgactgccggatgcatcgcatccggcatcaaccgcactctacttcttcttcgctgcagctctgcgccgtctgtccaaatccttcagcaacttgttcacgccatcatcggcaaacatcgactcaagcgttgcggaaagcttgcgtcgccagtttttatactggtaactggtgccaggaatattcaccggttcggccatatccagccagtcttccggctgtagtcctaacagagcactgttactgtcggcaatgtagcgctgcaaaccacggttcagcgtcggcgtcatcgacatcaacgatgccttatgcccggcacgttttggcagacaaccatatttatgcagtgcatccagcagcccttgcttcgccagttcgcgatcctgatacagaccgcgcagtaccacttcatccggatacagccccagggttttgcccagcgttagatccccgctctcccagtaaccgcgtagcgtaggcaggtcatgtgtcgccgcaaccgccatcgactgctccggatacgctttcggtgcacggaacgtcttctcgtggtcgttttcgaaatagagcactttgtaggagtacacaccgctgctgcgcagcttaccgacaatctctaccggtacggtaccgagatcttcaccaatcaccatacagcgatgacgtttactttcgagtgccagaatcgagagcagatcatccaccggatagtgaacatacgcgccctgatctgccgtctcgccatacggtatccaccacaaacgcagcatcgacatcacatggtcaattcgtaatgcgccgcagttttgcatattggcacgcaacagctcgataaacggttcataggcacgcgcggtgatgatatgcgggtccattggcggtaatccccagttctgccccaacgggccgaggatatccggcggcgcgccaaccgacgctttcaggcaatatagttcacggtcacaccaggtttccgccccaccttccgctacgccaaccgccagatcacgatacaagccaatcggcatttcatagccctggcttatctcccagcaggcggcaaactggctgtaagccagccactgcaaccagagataaaaatcgacgtcattacgatgttcttcgcagaactgacgcacttctggtgaatccacgttctgatacatctctggccatgcaggccagccccagcgcatttcgtcctctttcacttgctgggcatgtagcgcatcaaaggctgcctgccagaacaggctgtcgccttgatctgcaacaaactggcgaaacgcggccatctgctcatcatcacgttgcgcgaaacctttccacgccattcgtaatgctgtcatttttagggcggtaaccgtggagtaatcgacccagtcggcatcccgcgcttgttgcagcgtctgttgcgtggtcggcaactgccaccaggcctgagcctcttcgctaagatggaaatcttcgacggctttaacgtcgatataaatcacattcagccaacggcgagaagacgggctgtatgggctggcactctccggatttgccggatagagcgcatgaatcgggttcaggccgatgaacgacccgccacgttttgccacatccaccagcatcgctttgagatcgccaaaatccccaataccccagtttttttccgatcgcagcgtataaagctgaacgcaggcaccccacagcttttgtttattcagcaacgcctgcggttcgtaacagcgtttcggggcgacaatcacccggcaatgcgcgcgctggtcgtcctgggtgagtgtcagcgtgtgataaccttccggcagcttcgtcggtagattgaacgctttgccccccgttacatggcctttgtactgtgttccttcttcggtggtcagcagccagctatattcgccgctgccctccaccaccatcggcatttttttgccgctggtataaaccatgacattcgggactggcgttaccgccactttcgtggcggtacgttgatgcatcgcgtcaagcaaacgccgtttggtttcggcgctaatcgactgcggtttaccgtgggcattgatgtaattggggctaatccccgccgccagcgcggcattatccagacgtttgctttccatcgagcttccttagcgttttgcctgccagatacgagcctgataatcgcgaatagagcgatccgagctaaacataccgcagcgggcggtattgaggatcgccgcgcgagtccaggcctcctggtcgcggtacagcacatccacctgcttttgtgcctcaacataggctgcgaaatccgccatcaccagatacggatcgccgccttgtttgccgatactgtgcagcatctggtcgaaggcatgcttatcgccgtcgctgtatttaccgctttccagctctttcaatactgcgtccagcaccttatctttcttccgccatttcaccgggtcgtagcctttggccagaattgccttcacttgttccacggtatgaccaaaaataaagatattttcttcaccgactttctcggcgatttcaacgttcgcaccatccagcgtaccgacagtaagcgcaccattgagcgccagtttcatattgccggtaccggaagcttctttacctgcagtcgaaatttgttcggagatatccgccgccgggatcagtttttccgccgccgaaacgcaataatccggcaggaacaccaccttcaacttatcgccaaccagtggatcgttgttgatcacgtcagccactttgttgatcgcaaagataatattcttcgccaggtagtagcccggtgccgctttcgcgccgaagaggaagacgcgcggtacgcgatcagcctgcgggttttcacgaatttctttgtacaacgccagaatatgcagcagattcaggtgctggcgtttgtactcatgcagacgtttgatctgaatatcgaaaatcgcctgtggattgatctcaataccggtacgaactttcacaaactccgccagacggactttattcgcctgcttgatctcgcgatattgctgacggaatttcgcatcatcagcgaatttttccagattgatcagctgatcgagatcgttagcccactctttttgcagtgatttatccaacagagccgccagtgcagggttgcactgtttgatccagcgacgtggggtaataccgttggtgacgttatggaatttgttcggccatagctggtgatattccgggaacagatctttcaccaccagatccgagtgcagcgccgcaacaccgttcaccgcgaaaccgccaaccacacacaggttcgccatatgcacttgtttatcgtgcaccaccgccagtttggcccacactttttcatcgcccggccaggttttctccaccagcgttttaaagcgagtattaatttcgttaataatctgcatatggcgcggcagtaagcctttcaccagtttcacatcccagcgttccagcgcttctggcatcagggtatggttggtgtaagcgaaagttttgctggtaatggcccaagcgtcatcccagctcatctggtgctcatcgatcagcacgcgcagcagttctggaatcgcgatagttgggtgggtatcgttcagctgaataacttcgtaatccgccagttcgtgcagtttacgccccaccagatgatggcgacgcaaaatatccgctaccgaacaggcacactggaagtactgctgcatcaagcgcagctttttaccggcagtatggttgtcgtttggatagagaactttggtcagtttttccgcattgatgccctgctgttcggcacgcaggaaatcaccgtcgttaaatttagtcagatcaaacggatgcgcgtgcgtcgcctgccacagacgcagcggctgcgccacgccattacgatagccgacaacggggagatcccacgcttgaccggtaatggtaaactccggctcccagcgtccgtctttcgtcactttaccgccaatccctacctgcacatccagtgcttcgttgtggcggaaccacgggtagttactgcgatgccagtcatccggcgcttcaacctgtttgccatcgacaaaagactggcggaacaaaccatattgatagttcagaccgtaacccgtcgcagactgaccgacagttgccattgagtcgaggaagcacgccgccagacgtcccagaccaccgttacccagcgccgggtcgatctcttcttccagcaggtccgtcagattgatgtcataagccttcaacgaatcctgtacatcctgataccagccgagattcaacaggttgttgcccgtcaggcgaccaatcaaaaactccattgagatgtagttaacatgtcgctgattcgccaccggcttggcgaatggctgagcacgcagcatttcggccagtgcttcactcactgctagccaccactggcgaggagtcatttcagccgcagaatttaagccataacgctgccactgacgtgaaagcgcttcctgaaattgcttatcgttaaaaataggttgtgacataggagttccacttttcttagattttcaacacaacgttatcgctagtttgccaggctcgatgttgaccttcctcatcctgcgggggattaggcagggaggagttgcggggatgagcaaggaaatgtgatctcaaccacttaaagctagtgcaaaccacaggattagcagcaaatcaatgcaatacagcgcagaaaatctgtatctaagtgcaaaaaatggccgttgcgtattttcaaaaagcggaaggtaactctataaattaagtaaaggagtgaaacagtttcacaagtaaaatatccaatgtgctccatctcattcttaatagatttattaagatcatctttttagatggcactttcatcaggaatgaagaagaaacccttgcttaaatgaatctgatgaacataagggaaaccagtattcacgctggatcagcgtcgttttaggtgagttgttaataaagatttggaattgtgacacagtgcaaattcagacacataaaaaaacgtcatcgcttgcattagaaaggtttctggccgaccttataaccattaattacgaagcgcaaaaaaataatatttcctcattttccacagtgaagtgattaactatgctgattccgtcaaaactaagtcgtccggttcgactcgaccataccgtggttcgtgagcgcctgctggctaaactttccggcgcgaacaacttccggctggcgctgatcacgagtcctgcgggctacggaaagaccaccctcatttcccagtgggcggcaggcaaaaacgatatcggctggtactcgctggatgaaggtgataaccagcaagagcgtttcgccagctatctcattgccgccgtgcagcaggcaaccaacggtcactgtgcgatatgtgagacgatggcgcaaaaacggcaatatgccagcctgacgtcactcttcgcccagcttttcattgagctggcggaatggcatagcccactttatctggtcatcgatgactatcatctgatcactaatccagtgatccacgagtcaatgcgcttctttattcgccatcaaccagaaaatctcaccctggtggtgttgtcacgcaaccttccgcaactgggcattgccaatctgcgtgttcgtgaccaactgctggaaattggcagtcagcaactggcatttacccatcaggaagcgaagcagttttttgattgccgtctgtcatcgccgattgaagccgcagaaagcagttggatttgcgatgacgtttccggttgggcgacggcactacagctaatcgccctctccgcccggcagaatacccactcagcccataagtcggcacgccgcctggcgggaatcaatgccagccatctttcggattatctggtcgatgaggttttggataacgtcgatctcgcaacgcgccattttctgttgaaaagcgccattttgcgctcaatgaacgatgccctcatcacccgtgtgactggcgaagaaaacgggcaaatgcgtctcgaagagattgagcgtcaggggctgtttttacagcggatggatgataccggcgagtggttctgctatcacccgctgtttggcaacttcctgcgccagcgctgccagtgggaactggcggcggagctgccggaaatccaccgtgccgccgcagaaagctggatggcccagggatttcccagcgaagcgattcatcatgcgctggcggcaggcgatgcgctgatgctgcgcgatattctgcttaatcacgcctggagtttgttcaaccatagcgaactgtcgctgctggaagagtcgcttaaggccctgccgtgggacagtttgctggaaaatccgcagttagtgttattgcaggcgtggctaatgcaaagccaacatcgctatggcgaagttaacaccctgctagcccgtgctgaacatgaaatcaaggacatcagagaaggcaccatgcacgcagaatttaacgctctgcgcgcccaggtggcgattaacgatggtaatccggatgaagcggaacggctggcaaaactggcactggaagagctgccaccgggctggttctatagccgcattgtagcaacctcggtgctgggtgaagtgctgcactgcaaaggcgaattgacccgctcactggcgctaatgcagcaaaccgaacagatggcacgccagcacgacgtctggcactacgccttatggagtttaatccagcaaagtgaaattctgtttgcccaagggttcctgcaaaccgcgtgggaaacacaggaaaaaacgttccagctgatcaacgagcagcatctggaacagctgccgatgcatgagtttctggtgcgcatccgagcacaactgttatgggcctgggcacggctggatgaagccgaagcgtcggcgcgtagcgggattgaagtcttgtcgtcttatcagccacagcaacagcttcagtgcctggcaatgttgattcaatgctcgctggcccgtggtgatttagataacgcccgtagccagctgaaccgtctggaaaacctgctggggaatggcaaatatcacagcgactggatctctaacgccaacaaagtccgggtgatttactggcaaatgaccggcgataaagccgccgctgccaactggttgcgtcatacggctaaaccggagtttgcgaacaaccacttcctgcaaggtcaatggcgcaacattgcccgcgcacaaatcttgctgggcgagtttgaacctgcggaaattgttctcgaagaactcaatgaaaatgcccgcagtctgcggttgatgagcgatctcaaccgtaacctgttgctgcttaatcaactgtactggcaggccggacgtaaaagtgacgcccagcgcgtgttgctggacgcattaaaactggcgaatcgcaccggatttatcagtcattttgtcatcgaaggcgaagcgatggcgcaacaactgcgccagctgattcaactcaatacgctgccggaactggaacagcatcgcgcgcagcgtattctgcgagaaatcaatcaacatcatcggcataaattcgcccatttcgatgagaatttcgttgaacgtctgctgaatcatccggaagtgccagaactgatccgcaccagcccgttgacccaacgtgaatggcaggtcctggggctgatctactccggttacagcaatgagcaaattgcgggcgagctggaagtggcggcaaccaccatcaagacgcatatccgcaatctgtaccaaaaactcggcgtcgcccaccgtcaggccgcggtacaacacgcgcagaaactgctgaagatgatgggatatggggtgtgagtttagccggataatgcattggatccggtttacatctttacatcattcaatactcacccgcgttacgccatctgtttctatcaaaccaaaccgcaccggcaagaaacgctccaccacggcgatattggtcagcagatggcatgaaggatgggcgaccgtaaattctcccgcgcccgccagcgccatcggtagcaccagctggtcggcgagatattcccccactaccgccgggcttgccaggtagcgtttcacctctttcactaactgcgcggctaccacctcggcactgacgcgcttttcaccgacgacgaaaaagcgttcagtgatattttcactttcgacttccagcgagacggtattacccggcccctggtcgcgcggcaggttatgaatattctgttcatgcagggaaaaactccccgccagtgtagcgatttcacgctcagcaacatggcgcggcacaccagctaatagaacttctccacgcatctgcacaatgttcccgcgctcgccaagttgcaaggtgttaaacgatgccacgggcgagacttccgttgccaccacgccgcctccggcaggataaaaaccgtgacgtaacagcgtggtttgctgatgaattcctattttcgccagcagcggctccagcacccggcggataaaatccgcaggcggggccgacgggttatcggtgcctccgctcacttcaacacgcgaaggtccatcggcaaaccacagcgcgggcagcaccgtttgcagcaccagcgtacagcttccggcactaccgatagcaaagcggtactcgccgccgcgcacggtgccaagccggaagaccagacgctgcgaccccagctccgcgccttccaccgttgccctacaaatttccgcagccgcttttaccgcggtcagatgctggcgcaacagccccggtttcgcccgcccggcacgaatgctggtgatggtaaatggctggccggttatcatcgacaggctcagcgccgagcgcaggatctgcccgccaccttcgccctgtgcgccatccagcgcaatcatccttttcatcatttatccttttacgcacaccacctgacgcagggtatagataacttccaccagatcgctttgtgccgccatcaccgcatcaatatctttatacgccatcgggatttcgtcgatcacttcggcatctttacggcattccacatgcgcggtggcacgaatttgatcttccacgctgaacagttttttcgctttagtacggctcattacccgcccggcaccgtggctgcacgaacagaaagattcttcatttcccagcccacggacgataaagctttttgctcccatcgaccctggaataattccatattgaccagcacgcgcaaacaccgcgcctttacgcgtcacgtagatctcttcaccaaagtgctgttctttttgcacatagttgtggtgacagttgatctcttccatcgccagcgtttgtggctgtctgaccgttttctgcgtaatgctctgcaatgccgttaccacgttttccatcatcgcatcgcggttaaggctggcgaaaagctgcgcccaggccacggctcttaggtaatcatcaaagtattccgtaccttccataaagtacgccagatcacgcgacggcaacgtctcaagttggtcctgcatctctttttgcgccagatcgataaagtaagtcccgatggcgttaccaattccgcgtgaaccggagtgcagcataatccacacctgctccgactcatcaaggcagatttcaataaagtggttacccgttcccaggtgtttatagttgttagtgttaaggaaacgcggatatttttgcgttaaccactgataaccggcctccagctcagcccatttcgcatcgacgttaaaaggcgggttttcccatgcgcctttatcacgtttacaacgcccggtagtacgcccgtgtggtacggccgtttcaatcgcttgacgcagctccgccaggttttcaggcaggtctgccgccgttaacgcggtacgcagcgcgttcattccacagccaatatccacgcccaccgccgccggaataatcgcccctttggtcgggatcacgctaccaatggtggaacctttacccaggtgtacatcaggcattaccgcaatatgtttgaaaataaacggcatcttcgccgtattaataagttgctgacgcgcatcggcttctaccggcacgcctttggtccacatttttaccggggcattttcagtggtcagtaattcgtaattcattttgtttttctcttttcgttgttggtaatgactccaacttattgatagtgttttatgttcagataatgcccgatgactttgtcatgcagctccaccgattttgagaacgacagcgacttccgtcccagccgtgccaggtgctgcctcagattcaggttatgccgctcaattcgctgcgtatatcgcttgctgattacgtgcagctttcccttcaggcgggattcatacagcggccagccatccgtcatccatatcaccacgtcaaagggtgacagcaggctcataagacgccccagcgtcgccatagtgcgttcaccgaatacgtgcgcaacaaccgtcttccggagactgtcatacgcgtaaaacagccagcgctggcgcgatttagccccgacatagccccactgttcgtccatttccgcgcagacgatgacgtcactgcccggctgtatgcgcgaggttaccgactgcggcctgagttttttaagtgacgtaaaatcgtgttgaggccaacgcccataatgcgtgcagttgcccggcatccaacgccattcatggccatatcaatgattttctggtgcgtaccgggttgagaagcggtgtaagtgaactgcagttgccatgttttacggcagtgagagcagagatagcgctgatgtccggcagtgcttttgccgttacgcaccaccccgtcagtagctgaacaggagggacagctgatagaaacagaagccactggagcacctcaaaaacaccatcatacactaaatcagtaagttggcagcatcaccttcgttgtttgctgtcgtgataattgcaaccgtcgtgccagaaaattaaataagcagattaattttttaattcattgtttttaaataggttaaatctttacgtccgtaaacggagattttccacaaaaccaattcaccgataatgaaatatcgtcttttataaggatatctaagatgcgtaaaacagtggcttttggctttgtcggtaccgtgctggattatgccggacgcggcagtcagcgctggtcgaaatggcgtccgacgctttgtttatgccagcaagaatcgttagtcatcgatcggctggaattgttgcacgacactcgctcgcgctcgctattcgaaacgcttaaacgcgatatcgccagcgtttcgccagaaacagaagtcgtgggcgttgagattgaactgcataacccgtgggatttcgaagaggtttacgcctgcctgcatgatttcgcccgtggttacgagtttcagccagaaaaagaagactatttaattcacatcaccaccggcacccacgtcgcgcagatttgctggtttctgctggcggaagcgcgttacctgcccgcccggctgatacaatcttcacctccgcgcaaaaaagaacagccgcgcggcgcaggtgaagtgacgattatcgatctcgatttaagccgttataacgccatcgccagccgctttgccgaggaacgccagcaaacgcttgattttcttaagtccggcattgccacgcgtaacccccacttcaaccgcatgattgagcagatcgaaaaagtggcgatcaaatcccgcgcgccgattctgcttaacggtccaaccggcgcgggcaagtcatttctggcgcgacgcatcttcgagttaaaacaggcgcggcatcagtttagcggcgcgtttgtggaagtgaactgcgccaccctgcgcggcgataccgccatgtcgacgctgtttggtcatgtaaaaggcgcgtttaccggggcgcggtaatctcgtgaaggtttattacgcagcgccaacggcggaatgttgtttcttgatgagattggcgaactgggcgcagacgaacaggcaatgctgctaaaagccattgaagagaaaaccttttacccgtttggcagcgatcgccaggtgagcagtgattttcagcttatcgccggaacggtgcgcgatttgcgccagctggttgccgaaggcaaatttcgcgaagatctgtacgcgcggatcaatctctggaccttcaccctgccgggtctacgccagcgccaggaagatattgaaccgaaccttgattatgaagtggagcgccacgccacactcactggcgacagcgtgcgttttaacaccgaagcgcggcgcgcctggttggcttttgcgacctctccccaggcaacatggcgcggtaactttcgcgaactttctgccagcgtcacgcggatggccacctttgccactagcggacgcatcactctggacgtggttgaagatgagataaaccgtctgcgctataactggcaggagagccgcccctccgcgcttacggcgttgctgggcgcagaggcagaaaacatcaatctcttcgaccgtatgcaactggaacacgttatcgctatctgccgccaggcaaagtcgctttctgcagccggacgacagctttttgatgtttcgcgccagggcaaagccagcgtcaatgacgcggatcggctacgcaaatacctggcgcgttttggtctgacgtgggaagccgtgcaggatcagcacagctccagttgaatatgatggtccgtcagcacctgcattacgcttactggcggcggggcgtcggtgtagacggcatctaccatgctgatgctgcccatattgaccatcgcgttacggccaaatttcgagtgatcgacaaccagcataacgtggcgcgagttctcaataatggcgcgcttggtgcgaacttcgtggtaatcgaactccagcagcgagccgtcgctatcgatgccgcttatccccagaatgccgaaatcaaggcggaactgggagataaaatcgagcgtcgcttcgccaatgatcccgccatcgcggctgcgtaattcgccaccggcgagaataatgcggaaatcttcttttaccatcaacgtgttagcaacattgagattgttggtgacaatacgcaaattgctgtgattaagcagcgcgtgcgccaccgcttccggcgtggtgccgatatcgataaacagtgtcgagccgttggggatttgctccgccactttgcgggcaatcctctctttttcttcggtctgggtggctttgcgatcgtgccacggcgtgttaaccgaactggaaggcagcgccgcaccgccatggtgacgcaggatcaggttttgctccgccagctcattgaggtcgcggcgaatagtctgcgggctgacggagaaatgctctaccagctcttcagtactgacataaccctgctgtttaaccagttcgataataccgttgtgacgttgtgtttgtttcatttataaatccctggaattattttcgttttcgcgcattgagcgaatcaacaaaagccatcgctaaacccacggctaacccggcgatgtgtgctccgttcgccatcgacatcccaaacaaatcaaaccatccggcgacaatccagatcagcgcaaagataattaacccacgttgcaggtaaatgccactttgcggatcgcgttcaccacgtagccagacgtagcccatcagcgcatacaccacgccagaaagcccgccaaaccacggcccgctgaatttttgctgcacatagccgcttaacagggcgctaatgagagtaataacaattagcttaccgctaccgaggcgtttttccaccgcaccgccgagataccaccaccagagcaggttaaagaggatatgcatcagcgagaagtgcattaacgcgtgggtgaagtaacgccagaactcaaatttcagtgctggatcgaatggccaggccagccataacatcacttcctgatcgccgagaatttgcatggcaataaacaccaccacgcaggcgatcatcatcacccaggtcaccggacctgcgcgttcacgcaaggcggcaaagaaaggataacggcgataatgcaggccactgccggtatggcctgcctgccagctggccgccagataacgcggatctgccgggttttcgagaaaacgcgccagctccgcccgtacgcgctcggcctgggactcatccgccagccagacatcgctttggttatgttgttgaatcgtgaggataacaccctgcgtcgccatgtaatcaacaaacgcctgcgccacgcgggggttagcaaaagaggtaatcatcaacatcgttgctgtcgcttattccacacaaaaggggacagtataaagcgttacgcgccgtacgccacctctgcgggaaactgacgttgccaggcttcaaagccgccgtcaatgctatagaccacatcgtagccctgttgcagcagatactgcgccgcgcctttgctgctattgccgtgataacacatcaccatcaccggagtgtcaaagtcgttatcacgcataaacgcgcccagcgtgtcgttggttaaatggaaagcctgcaccgcatgccccatagcgaaactctgtggatcgcgaatatcgaccagcaccgcctctttttcctgcaacttctggtgcgcgtcggcaacgttaatacattcgaactgatccatgcgtctctctttctttacaaacaagtgggcaaatttaccgcacagtttacgtcgaagcggcagataaacgccataatgttatacatatcactctaaaatgttttttcaatgttacctaaagcgcgattctttgctaatatgttcgataacgaacatttatgagctttaacgaaagtgaatgagggcagcatggaaaccaaagatctgattgtgataggtggcggcatcaatggtgctggtatcgcggcagacgccgctggacgcggtttatccgtgctgatgctggaggcgcaggatctcgcttgcgcgacctcttccgccagttcaaaactcattcacggtggcctgcgctaccttgagcactatgaattccgcctggtcagcgaggcgctggctgaacgtgaagtgctgctgaaaatggctccgcatatcgccttcccgatgcgttttcgcctgccacatcgtccgcatctgcgcccggcgtggatgattcgcattggtctgtttatgtacgatcatctgggtaaacgcaccagcctgccgggatcaactggtttgcgttttggcgcaaattcagtgttaaaaccggaaattaagcgcggattcgaatattctgactgttgggtagacgacgcccgtctggtactcgccaacgcccagatggtggtgcgtaaaggcggcgaagtgcttactcggactcgcgccacctctgctcgccgcgaaaacggcctgtggattgtggaagcggaagatatcgataccggcaaaaaatatagctggcaagcgcgcggcttggttaacgccaccggcccgtgggtgaaacagttcttcgacgacaggatgcatctgccttcgccttatggcattcgcctgatcaaaggcagccatattgtggtgccgcgcgtgcatacccaaaagcaggcctacattctgcaaaacgaagataaacgcattgtgttcgtgatcccgtggatggacgagttttccatcatcggcaccaccgatgtggaatacaaaggcgatccgaaagcggtgaagattgaagagagtgaaatcaattacctgctgaaagtgtataacacgcactttaaaaagcagttaagccgtgacgatatcgtctggacctactccggtgtgcgtccgctgtgtgatgatgagtccgactcgccgcaggctattacccgtgattacacccttgatatccatgatgaaaacggcaaagcaccgctgctgtcggtattcggcggtaagttgaccacctaccgcaaactggcggaacatgcgctggaaaaactgacgccgtattatcagggcattggcccggcatggacgaaagagagcgtgctgccgggtggtgccattgaaggcgaccgcgacgattacgcagctcgtctgcgccgtcgctatccattcctgactgaatcgctggcgcgtcattacgcacgcacttacggcagcaacagcgagctgctgctcggcaatgcgggggcgataagcgacctcggggaggatttcggtcatgagttctacgaagcggaactgaaatacctggtggatcacgaatgggtccgccgcaccgacgatgccctttggcgtcgcacaaaacaaggcatgtggctgaatgcggatcaacaatctcgtgtgagtcagtggctggtggaatatacgcagcagaagttgtcgctggcgtcgtaaggatgatgcccggttgaagtgcaaccgggctatttggattccttagactattcattgtaaataattgaataacggcccctgagctaaaatcgccaaacttaagcacgttacccaatcgccccacttcttcctctggtttctattttttctgcaccaatggcaataatatcccaatgcaaaaccaagctgtgcactaatcgggccgacaaaatcagtccaaggctgcggccaaaaaggggaaaaattcaggggaggccagacaaacgtcagaaagaaatttcggatattttccagcaacgctgatttctctggagaaatataaagaatgaaattcgagagaattaaccagaaatagaccggcgaaaagaccagccagcaatgcagtctgttttttaattcaggaggcgttctgcgggagaattgccaaccgatgccagccattacactgaaaaaaagtgcatattcaaccattaactcaagttgtaattcctgaagagaaatacgcacaaccaggagcggaaaggagaatattatttctgccagaaaagttaacgtgaatataagcacggctaagacaataaccgtcggccataccaataatggcacgataacaaaaccgagaattacagggggaatataaagccggaatttaatcatttttattttcctggtgattcggatgatgcgtcatacatcgcgcataaacactcatcaattatccagtcatcttcccagacctgatattctgtcattggttcgggctgttttagcgggttctcaatcgcttgccgcgctctttctttcagtaaaggatgattatttctagcccaggcattgatttgggtggtaatggcgttatcgatatcgtcctggttatctctgatataatcctcacaatatctgttcaataaacaggcaagagaaacggtcgaccaaaagccgggaactgaattaatggcatccagcaatggcgcaagagcgatatcggcacggaaaaacatttccagcatatactgtaattcgacagcttcatcgccggatacccaatcagtcatatactggcaggcaaatcgctgtaaaattgggtgatgctgccaacttactgatttagtgtatgatggtgtttttgaggtgctccagtggcttctgtttctatcagctgtccctcctgttcagctactgacggggtggtgcgtaacggcaaaagcactgccggacatcagcgctatctctgctctcactgccgtaaaacatggcaaatgcagttcacttacaccgcttctcaacccggtacgcaccagaaaatcattgatatggccatgaatggcgttggatgccgggcaactgcacgcattatgggcgttggcctcaacacgattttacgtcacttaaaaaactcaggccgcagtcggtaacctcgcgcatacagccgggcagtgacgtcatcgtctgcgcggaaatggacgaacagtggggctatgtcggggctaaatcgcgccagcgctggctgttttacgcgtatgacagtctccggaagacggttgttgcgcacgtattcggtgaacgcactatggcgacgctggggcgtcttatgagcctgctgtcaccctttgacgtggtgatatggatgacggatggctggccgctgtatgaatcccgcctgaagggaaagctgcacgtaatcagcaagcgatatacgcagcgaattgagcggcataacctgaatctgaggcagcacctggcacggctgggacggaagtcgctgtcgttctcaaaatcggtggagctgcatgacaaagtcatcgggcattatctgaacataaaacactatcaataagttggagtcattacctaaaattgcccgttcatccgcacgccagttttctttgttggcaaggttgatacggcgcagagaaaaaactacgtgaatattgtcaaaatgcccctgtgcaacaaattccagtaaacgcggcagaaaatagcggacctcatcgctattttgcggatcaggccctgggctactattccaggcattgattaaggaatacgggatcgctcgtaacgatgtactccgtaatgccttttgttcctgctgactcaggcaatattcacaacaaaccacaaatttctgcggcacccgataacgacgaaaggtgtgataaatctgctcaattaatgcctgcatggcggggctgggttgcatagttaccccctcgcccgctgatcgcgtgtaaacggttgatagacaaaacgagcattcgccgcgttcaggcgaataagggcgctacgcgaaagggaaaagctggggcgaatgcaactattgcagtctcgacagctttcctctgcgcaattttccactgagtaatgacgcgtgtagagtttcagttcggcctgcttatcgcgaaatccgcgtaaactgttattgttatgaaatttccaggcatctttaaagacctgaaagatatagacatcctcaatccaggagtcacattttttaagcgggcgctttgctattatcacccgctcatccggatttagcatcgccgtaaattgtacggtgacgtcatttgtcgtgttcaggtcacattgaacatctggtacatcactgatataggggtcaaatccaaaatcagcaccacaggcacaaagacggctaatggtggcggtatcgagggaaaatcccggccataccttgctggaggttaagccaatatttaatgtgacatcatatcgaagcaatccctcaagaccgtcagcaccgacgaacttttccccttcatccaaggcctggttaataagttgctgaacaatgccttcatcccagtatgccgatttgcagttggcaatcgtaatatccacgcctgtgaagggatcagtaccggcaaggcttgcaaataatgtattaactaattccatttttattatccagctttaaggtagcgtcttatacatcgggacataacctacatcttccaccaaactctgtccctgcggcgttaaaaaccactccaacaatttttgtgtctctgacgtcgtattttcccgcgttaccataaaggcatcgacgatatagggatatttgccgttgcgaatgttttcggcagtcggtgcaataccgttaatcgctagcagttttatatttttatcggcgttcatttgtgttgcgtaataacggaaggtgggtgatgctgccaacttactgatttagtgtatgatggtgtttttgaggtgctccagtggcttctgtttctatcagctgtccctcctgttcagctactgacggggtggtgcgtaacggcaaaagcactgccggacatcagcgctatctctgctctcactgccgtaaaacatggcaactgcagttcacttacaccgcttctcaacccggtacgcaccagaaaatcattgatatggccatgaatggcgttggatgccgggcaactgcacgcattatgggcgttggcctcaacacgattttacgtcacttaaaaaactcaggccgcagtcggtaacctcgcgcatacagccgggcagtgacgtcatcgtctgcgcggaaatggacgaacagtggggctatgtcggggctaaatcgcgccagcgctggctgttttacgcgtatgacagtctccggaagacggttgttgcgcacgtattcggtgaacgcactatggcgacgctggggcgtcttatgagcctgctgtcaccctttgacgtggtgatatggatgacggatggctggccgctgtatgaatcccgcctgaagggaaagctgcacgtaatcagcaagcgatatacgcagcgaattgagcggcataacctgaatctgaggcagcacctggcacggctgggacggaagtcgctgtcgttctcaaaatcggtggagctgcatgacaaagtcatcgggcattatctgaacataaaacactatcaataagttggagtcattacccggaaggtgtaacctattgcgttgtttgtattacggtattcggcaacgactttaatcattccctccatcatacttgccacttctgtttcctgcggcgagatcatgcggacatttttcatgacctgggattgcatcaccgtctggctaccagagtcttccgggcgttgccaggtctggatctcctgatcgttaccgccaacagtacgccagttggtaattgcaccactgaagatgtcacgcacctgttgttcagtcagggaattaaccggattatccgcattgacgatgaaaacaaacgcttcacgggcaaaaggcgtgtacagcaaagtaacgcccgattcctcagcgcgttttttctgcccaccggaaggttgcgccacaaaaataatatcagcatcacctttaacaatcctgttatacgcatcgggggtacgagagctctccagatattccctggtgtgaaaatcttccggtataacgcttaaagcataaaatgcagaggcataaattgggtacgccgccgtagcaccatcgagtcgcggccagttttgcgtaaactgaatttgcggtttaccacgcagtggtgtcagttgattattgagtttatcgggtcgccaggcccaggtatcaatattttcgcgcacaccgacaccgggattgagctgtttatataaataaccctgataaccagcgacaaaaccaagcatgagaaggataaacaggagggaattacggcaacgtagcccggatgtaccggttaaaggatgtctggttggccggccgtaccccagcgaaaaactgatatgcgcgccaacgggtataatgactatccaccagtactcacctccgactactgagactaacaaaacgcccagccaggggagcataagatcagccaaccaacccgatcccatctggtgaaattgataatctgccagatgcagcgcgattatccagccaaccaggattaataaaccgggtactaaaaaaagacattgtcgccagacggctatttctcttttttctggtgcactatcgcctgcccatactcgccccgagaaaaatagcattaatgcgcccagcgccagcataaaaatgttgagcagaaggtaacttgttggcgtgataaggatattacaaacttcaataataccggcaagtccgacacccagcatagcaacaaccgccgccaaaaattgcgtcagtatggggatgccgaaaaaagtcattaccagcgaggacaaaatccattttctgttttgcattattctttccattctttttgaatggtgaaattatactccccgagtccccttgccccttctggacacttttccgaaatgatggcggaaaaaaacgggaccctttggcctaatgccgatcagttaaggatcagttgaccgatccagtggctgtgtaagaatccggaaacgctcacttgtttccggatttttttatgcacattggacaggctcttgatctggtatcccgttacgattctctgcgtaacccactgacttctctgggggattacctcgaccccgaactcatctctcgttgccttgccgaatcaggtactgtaacgctacgcaagcgccgtcttcccctcgaaatgatggtctggtgtattgttggcatggcgcttgagcgtaaagaacctcttcaccagattgtgaatcgcctggacatcatgctgccgggcaatcgccccttcgttgcccccagtgccgttattcaggcccgccagcgcctgggaagtgaggctgtccgccgcgtgttcacgaaaacagcgcagctctggcataacgccacgccgcatccgcactggtgcggcctgaccctgctggccatcgatggtgtgttctggcgcacaccggatacaccagagaacgatgcagccttcccccgccagacacatgccgggaacccggcgctctacccgcaggtcaaaatggtctgccagatggaactgaccagccatctgctgacggctgcagccttcggcacgatgaagaacagcgaaaatgagcttgctgagcaacttatagaacaaaccggcgataacactctgacgttaatggataaaggttattactcactgggactgttaaatgcctggagcctggcgggagaacaccgccactggatgatacctctcagaaagggagcgcaatatgaagagctcagaaaactgggtaaaggcgatcatctggtgaagctgaaaaccagcccgcaggcacgaaaaaagtggccgggactgggaaatgaagtgacagcccgcctgctgaccgtgacgcgcaaaggaaaagtctgccatctgctgacgtcgatgacggacgccatgcgcttccccggaggagaaatggcggatctgtacagtcatcgctgggaaatcgaactgggatacagggagataaaacagacgatgcaactgagcaggctgacgctgagaagtaaaaagccggagcttgtggagcaagagctgtggggtgtcttactggcttataatctggtgagatatcagatgattaaaatggcggaacatctgaaaggttactggccgaatcaactgagtttctcagaatcatgcggaatggtgatgagaatgctgatgacattgcagggcgcttcaccgggacgtataccggagctgatgcgcgatcttgcaagtatgggacaacttgtgaaattaccgacgagaagggaaagggccttcccgagagtggtaaaggagaggccctggaaataccccacagccccgaaaaagagccagtcagttgcttaactgactggcattagaccctttggccccgttctatttattggtgaacttacaatctcaccggatcgatatgccagatatgatcggcgtactctttgatagtacggtcagaagagaagtagcccatattggcaatgttcagcatcgcttttgcggtccactcttcctgaagctcgtagagttcgtcgactttatcctgacaatcgacatagctgcgataatccgccagaacctgatagtgatcgccgaagttgatcagcgaatcaaccagatcgcgatagcgacccggatcttccggactgaatacaccgctgccgatttgcgtcagcacctgatgcagctcctcatctttctcgtagtattcacgcggtttgtagccctgacgacgcagttcttccacttcttccgctgtgttaccaaaaataaagatattgtcagcaccgacatgatccagcatctcgacattcgcaccgtccaacgtaccgatagtcagcgcaccgttaagcgcaaacttcatgttactggtgccggaagcttccgtccctgccagcgaaatctgttcagacagatctgccgccggaatgatcaactgcgccaggctaacgctgtagttcgggatgaacacgactttcagcttatcgccaatctgcggatcgttgttgatcactttcgctacgtcattgatcaaatgaataatgtgcttcgccatgtaataggccgaagccgccttaccgccaaaaatattcacgcgcggtacccacttcgcatccgggtcggccttgatgcggttatagcgggtaatcacatgcaacacattcatcaattgacgtttgtattcgtgaatacgtttgatttgtacatcgaacaacgcctttggattcaccaccacattcagctgctgggcgatatactctgccagacgctttttgttctccagcttcgcctgatgcacagcgtgattaaccattgggaaatcacagtgttgttgcagctcattaagcaggctaaggtcggtgcgccagttacggcccaggtgttcgtccagcacggctgaaagcgatgggttcgctaccgccagccagcgacgcggcgtcacaccgttggtgacgttggtgaaacgacccgggaagattttcgcaaagtcggcaaacaacgattgcaccatcagattagagtgcagttccgatacaccgttaactttgtggctcacaacaaccgccagccaggccatacgcacacgacgaccgttggattcatcaatgatcgacgcccgtcccagcagatcggtatcgttcggatactgttcctgcaaggttttcaggaaatagtcgttgatttcaaagatgatctgcaggtgacgcggcagaattttacccagcatatcaaccggccaggtttccagcgcctcgctcatcagcgtgtggttagtgtaggagaagacctgacaacacacctcaaacgcgtcgtcccagctaaattggtgctcatcgatcagcagacgcatcatctcaggaatcgacagtaccggatgggtatcattgagatgaatcgcgattttatccgccaggttatcgtaggttttatgcaactgataatggcggcttaaaatgtcctgaatggtcgaggaaaccaggaagtattcctgacgcaggcgcagctcacgcccggagtaggtggagtcatccggatacagtacgcgagatacgttctcggagtggtttttatcttccactgccgcgaagtagtcaccctggttgaatttaccgaggttaatttcgctactggcttgcgcactccacaaacgcagcgtgttggtcgcgtcggtgtcgtaaccagggattatctgatcgtaagcgactcccagaatctcttcggtttcaatccagcgcgtttttttaccttcctgctgaatgcgaccgccaaaacggactttatagcgcgtgttgtggcgtttgaattcccacgggttaccgtattccagccagtagtctggcgactctttctggctaccgttaacgatgttctgcttgaacataccgtagtcatagcggatgccgtaaccgcgccccggcaaccctaacgtcgccagagaatcaaggaagcaagccgccagacgtcccaggccaccgttaccgaggcctgggtcattttcttcatcaatcagctcttcgagatttaaccccatcgcttccagtgcgccctgtacatcttcgtaaattcctagcgacaacatggcgttggagagcgtacggccaatcaaaaactccatcgacaggtagtaaacctgacgtgtttcttgcgacaactgggcacggtttgaacgtaaccagcgctccacgagacgatcgcgcacagcaaataacgttgcgttcagccattcatgtttattggcgacgaccgggtcctttccaatcgtaaacatcagcttgtaagcgatagagtgcttaagagcttctacgctaagcgtgggcgatgaatatgtaaacggagcattcatataggcgtttcctgaaaactatttcaagcgatagtaaagctcacggtacgacttcgccgcgacctgccagctaaaatccattgccatagcctgacgttgcacaaaccgccacagtgaaggacgggaccacagtacaaaagcacgccgaatagcccgtaacagcgaccaggcattattatcttcaaagacaaacccactggcgacgccatctgcaaggttctcaagagaacagtcagaaaccgtatcagcaagcccaccggtgcgccgcactaacggcagcgtaccgtacttcaatccataaagttgcgttaagccgcacggttcaaaacggctgggcaccagaatgacgtccgcgccgcccataatgcgatgcgaaaatgcttcgtgatagccaatctgaacgcccacctgaccggggtattccgctgccgccgcaaggaaaccttcctgcagcaccggatcgcccgcgccgagtagcgccagctgcccgccctgctccagaagacccggtaaggcttccagcaccaggtcgagacctttctggctggtcagacggctcaccactgcaaaaagcggcactttatcgtcaaccttaagccccattgcgatttgtaactggcgcttattttccgctttatcttccaacgtatcgcgggtgtagcgcgaggccaacagtaagtccgtctctggactccagattttctcgtccacgccgttcagtacgccggaaagacgcccttcacgatgacgctgttgcaacagaccttccataccgtaggcaaactgcggttcggtgatctcgcgagcgtaggttggactgaccgccgtaatgtgatcggcatagtacagaccggccttcaggaaagagatttgtccgttgaattccagcccatgaatattaaagaatgaccatggcaattggatgtcattcatgtgatgtgcataaaacatgccttgataggccaggttgtgcacagtaaacaccgacttcgcaggacgcccgcgcgccgccagatacgcaggcgcaaggcctgcatgccagtcgtgcgcatgcaccacatcaggacgccagaatgggtcaagcccgctggccatttctgccccaacccaccccagaagcgcaaaacgcaatacgttgtcggtataggcaaataagttggtatcgtgatacgggcttcccggacgatcatagagatgcggcgcgtcaatcaggtatatgccaaccccgttgtaatgaccgaacaacagcgtgatatgtccggcgaaggtatcacgacgggatactacctgcgcatcggtcacgccacggcgaatatcgggaaatgcaggcaacagtacgcgagcgtcaacgccgtctgcgatttgtgctgcgggtaatgccccaataacatcagccagaccgccggttttaagcagcgggaacatctctgaacatacatgtaaaacctgcattatcgctcctgtttatgccctaacttccgtagcatttcgcgcgttaccagcacgatgccttcttctgaacgatagaaacgacgtgcatcttcctctgcgttttcaccaatcaccatgccttccggaataacacaagcacgatcgatgacgcagcggcgcagacggcacgagcgacctacccatacttccggtaacaatacggcggaatcaatgttgcagaatgaattcacgcgaacgcgcgagaacagaacggactgcaccaccaccgaaccggagatcacacagccgccggataccagtgagttaagggtcatcccgtggctaccggagcgatcctgcacgaatttcgctggcggtaatgattcattgtaggtgcgaattggccaattgcgatcgtacatatccagttccggcaccacagaggccagatcgaggttcgctttccagtaagcttccagcgtacccacatcgcgccagtacggctcggcatccgggtcggattgtacgcaagagagcgggaacgggtgcgcataggccagaccggcttcggtgatcttgggaatcaaatctttgccaaagtcgtggctggagttctcatcacgatcgtcttcttccagcagttcatacagatagtcggcgtcaaagacgtagatacccatactcgccagagatttgctcggatcgttcggcattgacggtgggttagcaggtttttcaacgaattcgataattttatcgttctcatcaaccgccataacgccaaatgcggaggcttcttcaatcggtactggcatacaagcaacggtgcaacgtgcgcctttttcgacgtgatcgataagcatacgcgagtagtcttgcttgtagatatggtcgcccgccaggatcaccacgtattccgctttataacggcggataatgtcgaggttttgggtgaccgcatctgcggtgccgcgataccagttttcccctttcattctctgctgtgctggcagcagatcgacaaactcgttcatttcttcattgaagaatgaccagccgcgctgaatgtgctgcaccagagtgtgggactggtactgggtgatcacgcccatacgacggatcccagagttgatgcagttagacagcgcaaagtcaataatgcggaacttaccgccgaagtgtacggccggttttgctcgcttattggttaaatccttcaggcgggtaccacgtcctcccgccagtatcagggcaacagatttcaatggcagctggcgcgccaacattaagtgatcgttcttctctaaactaaccatgactaactccttttttatcatctctggaacacacacaatccgtgtgcaggtccctgccagacagccgtaatcactgggttatcctctccagcgaatgggggaatggcgtgccactccccagcaggtaaaacaatctctgttacctcaagcgtggcgttaattgcgatcaaaaagcgatccgagagcagaatttgcagctgtttcggcccgttttgccactcatccgtgcttaaaggttgagcatatcgatttagccaacggacattgccgtcgccttcttcccaccagcgattctccaccaaagcgggaatgcgcttgcgcagatggattaacgcggcggtaaatgcggttaaaccactgcttgcctgcgaccagtccaaccaggttaattggttatcctgacagtaggcattgttattgccatgctggctgtgaccgtgttcgtcaccggccagtaacatcggcgtaccctgggagagcaacaacgttgttaacagggcgtgaatactgtcgcgccgccgttcaaccaggtcaagagaaccgcctaacccttctttaccatgattgttactgtaattgttgttggtcccgtcgcgattttcttctccgtttgcttcattgtgtttatggttgaagcaaacgcagtcgcgaagcgtaaaaccgtcatgcgcagtgacgagattaatcgcggcactcggcagacgaccattacgtttaaaaacatcgctggaggcagcaaaacgcccggcaaacgcccccagaggcaaatcataatgtagccagaaacgacgggcagcatcgcggaaatgatcgttccactcggcaaacagcggcgggaaatttcccacctgataaccaccaagggcgatatcccacggttcagcaattaacttcacctgcgagagcaccgggcagttctggatagcggtaaacaacggcgcatcctgacggaactctggcgtacggcccatgactgccgccagatcaaagcggaaaccatcgacgtgacaggtttctacccaataacgcaggcaggcgcaggcataatccaccaccgccggatgactcaaattgagcgtgttgccacaaccggtccagttgtgataatcgccgtcttctcttatccaataatagctacggttgtcgatcccacgcagcgagaataacgggccgtcgaggtccagttccgcactatggttgagcacgatatcaagaatgacttcgatacccgctttatgcagtgctttgattgcatcgcgaaactcatgcagcgccgtttctggcgagcaggcatacgccggatgcagcgcaaacatcgccaccgggttgtaaccccagtagttacttagccccatgcgttgcagacgtggttcactggcaaactgcgccaccggcagcagttccagcgcggtaatgcccaactgtttcaaatagttgatcatcaccggatgcccgagggctttataagtgccacggatctcgaccgggatctccgggtgcaggtacgttaatcctttaacatgggcttcataaatgatggtgctgccccacggcgtgcgcggcggggcatcatcttcccagtcatagtgatcaaccaccactacgcatttcggcgcaatggcggcgttgtcgcgatagtcaggttcattatgaccggcgtgcagcagcgggttatctttgaattccccttcaatttgccgcgcgcaaggatcaatcaacaacttcgccgggttaaagcgatgcccctcggcgggttgccaggggccatgaacgcgataaccataacgcaaacccgggcgcgcatccggcagataaccgtgccaaatgtcgccactgtgccctggcaagtcatagcgatgttcctggccattggcgtcaaagacacacagctctacccgctcggcatgagcggagaaaagtgtgaagttgacgccctgaccgtcgtaatgcgcgccgaggggagcgggtttgccaatggcgagtcgtgtcattctgcctcccgaaccagccagatagtggccagcggtggtagtgtcaggcttagtgaatgctgacgaccgtggctggcaatctcatcgctgtgtaccgtgccgccattgcctgcattactgccgtgatagtgcatggaatcggtattgaggatttcacgccatttgcctggctgattaatgccgaagcgataatcatgacgcggcaccggcgtaaagttactggcaacgataatttcgttaccctctttatcgcgacgcacaaagatcagcaccgagcgttctttgtcatccaccaccagccattcaaagccgtacgggtcaaaatccagttcatgcattgctttatggtggcggtaggtgaggttcagatcgcgcaccagacgctggacaccgtggtgccagttatcgccgccttccaacagatgccagtcgaggctggcgtcatggttccactcacggccttgggcaaattcgttccccatgaacagcagtttcttgcccgggaatgcccacatccagccatagtaggcgcgcaggttagcgaatttctgccatgcgtcgcccggcatgcggtcgagaatcgattttttaccgtggaccacttcatcatgcgacaacggcaggacgaagttttcagtgtagttgtagagaatcccgaaggtgagtttatcgtgatgatactgacgataaaccgggtcgagcttcatgtagtccagggtgtcatgcatccagccgaggttccacttgtaccagaagcccagaccgcccatatcctgcggacgagaaacgccagggaaatcggtagactcctcagccattgtcaccgcaccggaaacctgctcaccaagaatacggttggtattacgcaagaattcaatcgcttcaagattctcgcgcccgccaaattcgttcgggatccactccccctctttacggctgtagtcgcgataaatcattgacgccaccgcatcgacgcgcagcgcatcaataccaaaacgttcaatccagtaaagcgcgttaccgacgaggaagttactgacttcacggcgaccatagttgtagatcagcgtattccagtcctgatgatagccttcgcgcggatcgctgtgttcatacaagttcgtgccatcaaattcggcaagcgcaaagtcatcggtcgggaagtggcctggcacccagtcgagaatcacgttcagacccgctgcgtgtgcggcatcaatgaaataacggaagtcgtcgcgagtaccaaaacggcgggttggtgcatacaggccggttggctgataaccccaactgccatcgaagggatgctcgttaatgggcagtagttcgaggtgggtaaagcccatccatttagcataaggcaccagttgatcggccagctcgcggtagctcaaccagaaattgttatcggtgtggcgacgccaggagcccaggtgaacttcataaatagagattggcgcatcaaactgattcgcttttttgcgctcttcagtctgtacaaccttttccggcagcccgcaaataagagacgcggtttccgggcgcatttgcgcttcgaaggcataagggtcggacttcagacgcaagttgccattggcatcaatcatctcgtatttatagagctgaccgttatgcgccccagggataaacagttcccaaatgccgctctctttacgcaggcgcatcgggtgacggcgaccgtcccagtagttgaattgcccaaccaccgagacccgacgggcgtttggagcccagacagaaaaacgcgtacctgtgacgccatccatagtatctgcatgcgcgcctaaggtttcatacgggcgcaggtgagtaccttcagataatagccaggcatccatttcctggattagcggaccaaaacggtaaggatcatcaatcaggttttgctgaccatgccagacaacagccaactgatagcggaaaaaattcttacgtcgcggaatgacgccgctaaagaatccccgtgagtcgagacactccagttttgcgagtttgcgcccggttttcggttcaatcacccacacatcggtagcgtcgggtaaaagggcacggacttccagtcccgcggtggttttatgcattcccagtacggaaaaaggatccgcaaaatggcctgcaattagcgcgttaatcacgtctctatcgatacgatcggacatgcttgtcttcctgttttattgtgtcaccccatccaattggatttttgacttctggttgtgacatttttttgacctgaacggcgcagcactctgtgcatcctctctgcgtcgtcctcacttcaggtaaggctgtgaatactcatgtattcagccacccttaaagaatagccaatgctctatttaactcccggtaaatcatgaaacatctgcgcttactcctgtattacgcactaacaggggcggcatcgcgccccagatttaatgaataaagattacgccagttgacgaagcatccgacgcagcggctccgcggccccccacagcagctggtcgcccacggtaaaggctgacaggaactctggtcccatattcagcttacgcaggcggcctaccggcgtggtcagcgtgccggtaacggcagctggggttagctcacgcatagtgatttcccgatcgttcggaacgactttcgcccacggattgtgcgcagccagcagttcttcgacggtcggaatagacacatcttttttcaatttaatagtgaatgcctggctgtggcagcgcaatgccccgacacgcacacataaaccatctaccggaattacggaagatgtgttgaggatcttgttggtttccgcctgccctttccactcttcgcggctctgaccgttatcgagctgtttgtcgatccacggaatcaggctacccgccagcggcacgccaaagttatccaccggcagctcaccgctacgggttaaggttgtgactttgcgttcgatatcgagaatagcagaggacggggtcgcgagttcatctgccacatggccatacagatggcccatctgggttaataactcacgcatatgtcgcgcaccaccgccggaagcggcctggtaggttgcaacggacacccaatcaacaagatcattggcgaataaaccacccaacgacatcaacatcaggcttacggtacagttaccgccaacaaaagtcctgatgccattatttaatccgtcggtaatgacgtcctgattgacggggtcaagaatgatgatggcgtcatctttcatgcgcagagacgatgctgcgtcaatccagtaaccttgccatccgctttcacgaagctttggatagatttcgttggtataatcgccgccctgacaggtcacaatgatatcgagggcctttagcgcctccagatcaaaggcatcctgaagtgtgccagtggttccgccaaaagacggcgcagcctggccaagctgagaagtagaaaagaagacagggcgaatggcgtcgaagtcgcgctcttcaaccatgcgttgcatgagaacggagccgaccataccgcgccagccgataaaaccaacatttttcataagcgttttttcctgcaaagatgtgtgctgtataaatgtgccggtctcctcttggcacatctttcaccatacaaaaagcagccaaagtcgcaagtgaaattaatcaatgatagcgaagccatcagtaatgcgacttatcctgctttgttagcacgcagaaagtccgcggcaattatcagggaatttgagttatgaatgaaatcatttctgcagcagttttattgatcctgattatggatccgctcggaaacctgcctattttcatgtccgtactgaaacatactgaaccgaaaagacggcgggcaatcatggtgcgagagttgcttattgctctcctggtaatgctggtgttcctgtttgcgggtgagaaaattctggcatttctcagcctgcgagcagaaaccgtctccatttctggcggcatcattctgtttctaatcgccattaagatgattttccccagcgcttcaggaaatagcagcgggcttccggcaggtgaagagccatttatcgtgccgttggcaattccgttagtcgccgggccgactattctcgccacgctgatgttgttgtctcatcagtacccgaatcagatgggacatctggtgattgctctgctgctggcctggggcggcacctttgtcatcctgctacagtcttcgctatttttacgtctgctgggcgagaaaggggtgaacgcacttgaacgcctgatgggattgattctggtgatgatggcaacccagatgttcctcgacggcattcgaatgtggatgaaggggtaaggttcaaacaggtgctgcacacaaccagacgcggcacctgttttattacctgaactgataatgaccttcgcccaatcggataacccttccctcttcttctgcgcggttcagccacacactaatttgttcgatggttaaaccagtacaagacgccagcctttcaatacttatcgattcctttgcaaggatcgccagttccgccacaaagagttgataaaaatcgacaggcgtatacgcgggcattactgcgtaatttgcgtcatcttcatgcagcgaaaacagttctggttgagcgttacggagtgctctgtcatacatcagcccaggaacgtctggcagtctgatcgtcacattctcagcctgttcagcactccatgacgccccattttctactaatcgtgaattggctgattgcatatcctgatttggtttaacctgcacaggcagccactgatgttttaatgcctccatcgccccggttatcgttccaccggtcattcccgcacgtacaaccattgcgctttcagcaaggcaataaatatatttatttcgcgccatcgcattgccgacggtgaaacgtacctctgggtaaaacggcgaaatcaacaccaggttgcctgctataagcccttcacgccatttcactaacgtactcgtttttaacaagctatcagctaatacgccaacggcagttcccccggcctccagtgccgacgccattgcacattcatcaatacctcgcgcaccaccagagataacgcaaatcccctgttgggccagtttcgcggccagttgttgggtatagcgcaaatcgtcagtcggagcatctcgcgagccaacaatcgccataccttccgcttgcagtaatgctttattcccgcagccaaataaaacgggaggtgcatccgttcgcaatcggtttttcaagcgaacgggataatcagcatctccgcgggttaagatccataaaccggcgcgttgccacttatctaccgccaacaccagactatgaccacgcgccagcaagccaagaatacgctcctgagaaatacgcggatcgctccagcctgtaagtttctcttgcggttgcggcaccagaagctcggcgggactgatacgttggtgcttcagccataatgcaaacttcccccattcactattactaagaggtttatactcactcgccgccgcgcgagaaaaatcgctggttagcaggagagttgcttgtgcattggctgaaagattcatcaattttttaccgaggtagaagcaagggcaagaggataaaccgtcgggcaacctgcctggcgtaacagtgctgtcagaactgtcagcgtccatgcagaatccacgatatcgtcaaccagcaacgccggaccaggcatcaaaggaggggtaataacaaacgccccgtcgagattttgacactggtggaaacggttggtaatgactccaacttattgatagtgttttatgttcagataatgcccgatgactttgtcatgcagctccaccgattttgagaacgacagcgacttccgtcccagccgtgccaggtgctgcctcagattcaggttatgccgctcaattcgctgcgtatatcgcttgctgattacgtgcagctttcccttcaggcgggattcatacagcggccagccatccgtcatccatatcaccacgtcaaagggtgacagcaggctcataagacgccccagcgtcgccatagtgcgttcaccgaatacgtgcgcaacaaccgtcttccggagactgtcatacgcgtaaaacagccagcgctggcgcgatttagccccgacatagccccactgttcgtccatttccgcgcagacgatgacgtcactgcccggctgtatgcgcgaggttaccgactgcggcctgagttttttaagtgacgtaaaatcgtgttgaggccaacgcccataatgcgtgcagttgcccggcatccaacgccattcatggccatatcaatgattttctggtgcgtaccgggttgagaagcggtgtaagtgaactgcagttgccatgttttacggcagtgagagcagagatagcgctgatgtccggcagtgcttttgccgttacgcaccaccccgtcagtagctgaacaggagggacagctgatagaaacagaagccactggagcacctcaaaaacaccatcatacactaaatcagtaagttggcagcatcaccgaaacggttttgctgcattttctgcggtggattgtccacgactttttcaatggcatcaataaaaggtaagccaagtttcgccgccagtcgccgggcaaaatcaggaaccaggtcgaggtgctttaatgaaggaacgcagcatacccaggttggttcaggatgcggattccagcgttggcgaaccatttccgcacatgcctccaccagctcatcactgaatcgccccgtttttttctcctgtgctacctgctttccccacccggaatctccccaacgagaaaggactcgccccgtagatccttgtaaacccgcaggcaagttccctttaaatccgtattgcgtaaaagctccagatgctacctgtttattgagatttaatggcaggtcagcgtgtttaataaataaatttgccgcatggagtaagccgctatcaatatcgggcgacaacaacggatgctgaagacaactgctacatttaccacaacgttcggcacttggctcatcgagtgcgcggcgcagaaattgcattttgcactccttggtcgtgatatagctttcaacatctgccagctcattttttctctgattcatcaaatggttaattcgttcatggtcaggagagaaactgacgatagttctgcgccataatttctcggtatacaccacaggcgatggattttcagctaccaataatttcagtgctttttctatttgcccataacggagattcgtccgttgttcaatgcctcgtagggtaagaccgtcattctcgctaagtacgttgagtatttcatgaatttgcgcctccgcaggaaaggcgctttcacggaagaatttatgaatagcgcggtcttcaccaccacaaagcaatatgccaactgcggaatctatagcacgcccggcacgccctacctgttggtagtaaccgacaatagaccccggcatttgataatgaatgacgaaacctaaatcaggtttatcaaaccccatacctaatgccgtcgtcgcgaccagcactttgattttatttgccagcagcgcctgctccagatattccctggcagtattagaatcttccgcgccttcacaagtcacgccgctgtagtaagcaaatgcactgataccatttgtccttaaccactcggcgacaagttcggcatcgcgagtagtcagggtataaacaattcccgatttggaaaactgagggataaccgttgctaaccatgccagacgggatgactgttcacctaagactaaggcatcaagcgccaaactttcgcgagccagcgttccacgctgaatcacaatgtcacccaattgctgacggatatcctcaacgacacgattattcgctgtcgcggttgtacccagaacaggggtattcgcagtttcaagaaaatcctgattcgccaaccgttcaggtgaaatcagcagacaatctacaccaccccgcagcaacttatcgctaatgcgctgccattcttccctgtttgtagaattcaacgtttcagccgtaatacctaaccgttcagcggcggcaacctggttacgcatcagggcaagcaaaggagagatgataattgtcgggccagcgccgcgatcgcggaagattttactggcgatgaagtacacggcacttttcccccagccagtgcgttggacaaccagcagttttcgccgctgattaaccaccgcatctatagcttcccattgcccttccctgaaagtagcgctggtgttacttaacatccgctgtaacagcaattcagctccgtgtttctccatcatcttctccctcgtccgttaacgcagtgattagaacggataatgttccggtctttttgcgagagagatcaaaaagatgaagacaggagataagagaaatgaattactgcgagcaagctcgcagtaatttgtcgcagtaattaactcaacagctggaacgcaatcatcccaacaatggcaccaacagtgccgaggatggtttccatcatggtccaggttttcagcgtttcggcttcggtcgcgccggtaaatttaccgaacaaccagaaaccagcgtcgttaacgtggctgacaacaatcgaaccaccggcgatacaaatcgacagcgccgccatttgcgcaccggaattgttcagttgttcaatgaccggcatcaccagccccaccgccgttaaacaggcaacggtggcagacccctgaatgatgcgcactgcagctgccagcacgaagcaggtgatagcaatcggcaggcccatgccggttaacgcttcgcccagtgccggacctacgccagagtcaaccagcacctgtttgaacacgccgcctgcaccaatcaccagcagaatgatccccgccggttgcagcgcgtgaccgcaaatctccatcactttgtcttttggcatgccctgacgcattgccaggccataaatcgctaccagacaagcaaccagaatcgcggtaaacggatgaccaataaactcgaaccattcgtaagcggtagagccttctggcacaaaacgcgcggcaatggttttcagccccaccagcaccagcggcaacaggatcagcgacaggctgaatccgaaagatggcattttaccttcgccgagatgcggctcgctgatgtcgtcaggaatatgcagctcaacgtaacggctgatgaagttaccccacagcggcccggcaataatcattcccggaattgccgcacacaggccaatcaggatcatccagccaaaatcggcgttcatctgcgatgccagcagcattggcgctggccctggcaccaggaacgccgccgctgccgccacgcctgcgaataatgggattatcagcttcaccaggttcgtatcggtgtggcgcgccattgagaaagcaacgctaatcagcagaacaatcgccacttcaaagaacagcggtagcgcacagaccagccccgcaaggccgatggcataatgcgcgcggctgtgaccgaaggatttgagcattttgacggcaatctgatcgactgcgccggtttcatgtaagatcttgccaaacatagctcccagggcgacaaccaccgccaggaagccgagggtgcctcccatccctttttccatcgtcgctgcgattttatcgagcggcataccggaaaaaaggccagcccccatggacaccaccatcaaagccaggaaagcgtgcatacgcgccttcatgactaaaaacagcagcagtaaaacagaccctactgctgttaaaacaagcgttaatgtagtcactacttatttgccttttttaataacctcaatggtgcttgccacaacaccttccagcggttgatcgatatccaccaccagtacatcggtttcgtccgcacccggctcctgcagcgtttcaaactgcgtcaccaacatttgggttttaaagaaatggcctttgcgcgctttcaggcggctttcaatcacgtcaaaatcgcctttcaggtagatgaaagagagattcggattaccttcacgcagcaagtcgcgatagtgttttttcaatgcagaacagacgatcagtgacactttattagtgcgctgcatagcaaacgcggcgtcgttcagcgcctgcaaccagggtttgcgatcgtcgtcattcagcggttcgccagacgccattttttcgatattgcgccgtggatggaggaaatcgccatcaagaaacgcggcatgaagttgatgcgccacttcactggcgaccgcagatttgccgctgcccgatacgcccatcaagacgtaaatgtggtgatcatggttagtcgtgctcaaagtggtgcccccacaatacaagaattaaaaatgttacgggtaactgttatcggtaacattgtccagccggacaatatcagaagcaatatccatccgtgccttaagtgtataagtgtgagctacttcaaatttgtaggcttaaatagatccgcccggtgacaaggtgaaacctaaatctaacattttcggtgtcacagattcgccacgaatacgcgccagcaggcgttcagcgccaatactgcccatccgctcacgcggcgtcagcacgctcgctaaccgcggctccatcacctggccaatgtcatgaccgtggaaaccggcaatcgccatatcgtcaggaaccttcaatcccagacgctgacattcaaacgccgcgccgaccgccaggtcatcgttggtacagaacacgccatccagctgcggatattcccgccgcgcctggcgaatcagttcaataccggaagagtaagaagaagattgctcaaccatcacgctatacggcaccagacctgcatccagcatcgcctgttcgtatcccttctgtttgatgatagtacgttcgtcgagacgcgcgccgagataggcaatgtggcaatgcccgcgagcaataatggcggtggtcatctggcgtgccgcttcaaagttatcaaaaccgacggcgatatcgaggcacggcgactggctgtccatgagttccaccaccgggatccccgccacttcaatcatctttaaggtgcgcggcgtgtgggtacgttcggtgaggatcagtccgtcgatattccaggagagcatggattcgagacgttcttgctccatttccggtttataaccgtagtgagccagcatggtctgataaccgtgcgcgtcggtgacgctttcgattccgcgtaatacttccgcgaaaacctggttggtgagagaaggtaacaggacgccaatcgcccggctggtggcgttagagaggatatcgggcgcacgattgggaatatagcccagttcatcaagagcggcggcaatcttgccgcgtagagcgacggaaacctgctccgggttgcgtaaaaaacggctgaccgtcattttggtcacgcctacacggtcagccacatcctgaagtacgggtcttttctttttcatcgtcctgaaggtacaaaagagatagattctcttagtttaacacggacgcatcagaaccttcccggggaaaacagtgcttgtttacaattattagatatacactaaatcaattgcatcgcattgtgctaacgacgcggtaaaaccccggaagcgtgcatcagcacgcgaccggagcgagcgaggaagcctgcaaaaaggcaggcttcaaagatgccgttgagttttaaaccggcggcagatcgaacagtaacacttcgctgtcgctatccgcatggatggagattgcctgctcatcccagattgccagaccatcgctggtcgaggctttcacgccgttaatggtgacattgcctttcaccacctggatccagacgcggcgttcagcggcaatctgatgcaccgactgctcatctttcagcaacgcccagcggtacagttccatatcctgatgcactttcaatgaaccatctcgcgcatccggcgagagcaccagctgtttgccctgtacggcatcgaagcgacgctgttcataacgcggcgtaataccgttttcttcaggcatgatccagatctgatacagatgcagacgctcggtgctgcttgggttgtactctgagtgacgaatacccgtacccgcactcataatctggaactcacccgccggaacctgctctttattgcccatgctgtcctgatgctcaacagtaccttccagcacgtaggtcaaaatttccatatctttatgcgggtgagtgccgaagccctgccctgcttcaatcacgtcgtcgttaatcacgcgcagcgcggagaagcccataaagttcggatcgtaatagttggcaaaagagaaagtatgccaggagtccagccagccatgatttgcatgaccacgttcatttgctttgcgtaagtagatcatttgtattcgccccatgaatgatttcgatgggcttagtgtggacccgatctgcctgggatgatagagggtgaaaattgacccctctgttcaaaaaaattgaactattcgaggggccatcaaacttacttcgcgagagtcactgtggagggagaggcttgctcaaatccgcgttcaaggatttccagattggtaagaacttcagattccttgacgtaatttggcgcaccgtgggtgatggtttgatacaacgcatcataaacgcgcccgtaatcgcccatctccggcttcatctcttctctgaccgtcacgccctcgtcattgacatactccagcacaccgaccgaatcatccgctgcgaatcccggttcgcccggcataatattagccttcaggctggtttcctgctggtcgataccgtatttaataaacgaacctttcttaccgtgaacgataaatttcggataatcgattttcaccagatggctggttttgacgatggctttcaggtcgccataaaacagttgcgcttcaaaggtgtcgtcaggattggctttattacgcaggctgcagatgtcataagcgacgtgatccgggcgaccgaacagagaaataatctggtccatcgtatgcacaccaaggccatagaacgcgccatcctgcggcaacccaggtttggtttctgccaccgggcggtaatagtcaaaatggctttccacttcaacaatctctcccagcttaccgctttcaatcgcttttttcgccgtcaggaagcaggaatcaaagcgacgattctgatatggcgtgacggtcagccctttgcttttcgccagtgcaaacagctctttcgcctgcgcaagtgtcggagtgaacggtttttcgaccagcacatttttcccggcttccagcgcgcgcttcgcgtactcgaagtggctgtccgcatgggtgcagacaacaaccaacttaacatcgggatcgtttagcacttcgtcgagatcgctggtgaaatggatatgagagtaaatgggagcctgttcttccggcttcgcatggcgacgaaaaatatgcgcgacatgccagctatccttgcggttaagtacatacggcagatggtaacgggtggtgcttttgccgaagccaataaaggcgcagttgatgaccatgatttcgtcctttttaaggtggttatttacaccttagcgcaaagcggacgtggttcctactggagtgcgcataacgaacacaagcactcccgtggataaattgagaacgaaagatcaaaaaaaaagccagcacccggctggctaagtaatactggaagcaatgtgagcaatgtcgtgctttcaggttctccgcgagggtcttcctgatcgcgagacaataataatcattctcattcgcacttgtccaacactttttgcaaaaaaaatgcatttgactcgcatttgaaagtcaatgatgttgaaagggacatttaccccaaagaggacaaaggaatgagtgagatagtaatacgccacgcagaaacacgggattacgaggccatcaggcagattcacgcccagccggaggtgtattgcaacacactacaggtgcctcatccttccgatcatatgtggcaggagcgactcgccgatcgtcccggcatcaagcaactcgtcgcctgtattgatggagacgtcgtgggccatctcaccattgacgtgcaacagcacccacgccgcagtcatgttgccgattttggtatctgtgtcgactctcgttggaagaaccgcggcgtcgccagcgccctgatgcgagagatgattgaaatgtgcgacaactggttgcgggtagatcgcattgaactaaccgtgtttgtcgataacgccccggcaattaaggtctataaaaaatacggctttgaaattgaagggactggtaagaagtacgcattgcgggtgatgctgccaacttactgatttagtgtatgatggtgtttttgaggtgctccagtggcttctgtttctatcagctgtccctcctgttcagctactgacggggtggtgcgtaacggcaaaagcactgccggacatcagcgctatctctgctctcactgccgtaaaacatggcaactgcagttcacttacaccgcttctcaacccggtacgcaccagaaaatcattgatatggccatgaatggcgttggatgccgggcaactgcacgcattatgggcgttggcctcaacacgattttacgtcacttaaaaaactcaggccgcagtcggtaacctcgcgcatacagccgggcagtgacgtcatcgtctgcgcggaaatggacgaacagtggggctatgtcggggctaaatcgcgccagcgctggctgttttacgcgtatgacagtctccggaagacggttgttgcgcacgtattcggtgaacgcactatggcgacgctggggcgtcttatgagcctgctgtcaccctttgacgtggtgatatggatgacggatggctggccgctgtatgaatcccgcctgaagggaaagctgcacgtaatcagcaagcgatatacgcagcgaattgagcggcataacctgaatctgaggcagcacctggcacggctgggacggaagtcgctgtcgttctcaaaatcggtggagctgcatgacaaagtcatcgggcattatctgaacataaaacactatcaataagttggagtcattacctgcagcacggtggtaataatccgactcccgccaggactaccggtaaccagccaagttttaccgtctttcaccacaatggttggtgacatcgatgacagcggacgtttattcggcccgacggcgttggcatcaccgcccaccagcccgtaaatgttcggtacgcccggtttggcggagaaatcatccatctgattattaagcagaataccgctctcgcccgcgacaatgcccataccgaaggtggtgttcagcgtataggtcaccgccaccgcgttaccgtctttatccactacagagtaatgggtagtttgattactctcataaggcgcaagcttgccagggcgaatctcactggacggcttcgctttgttgatatcaatttgatcggcaatggatttggcataggctttattggtcagtgcctgccacgggactttgacaaaatccgggtcgccaagatattccgagcggtcggcgtaggcgtatttctccgcttctgccatgatttgcatcgcatcggcgctgccaaagccgtatttcttcatatcgaagttttccagaatattgaggatttgtacgatatggatcccgccggaggatggcggtggcatggagtaaacctgatacccgcgataatcgccgcttatcggagtgcgttcgaccgctttataggccgctaaatcttctttagtgatcaagccaccgtttttctgcatctcctgggcgatctgttccgcaatcgtgcctttatagaattcgtccgggccgttttcagcaatcatctccaggctctttgccaggttcgcctgcaccagcgtgtcgccctttttcagcggctcgccctctttccagaagatagctttactgttttcgtgattcggcaacacttcgctaccgtaggttttgagatcgtcagccagcgcgtcgttaacgataaaaccatcgcgtgccagtttaaacgcgggctgcacgactttgttcagcggcatggtgccgtatttatccagcgccagcgagaaacctgctaccgtacccggtgtgccggaagccagatgcgaagtgagtgattttttgctgtccgggttgccctgatcatcgaggaacatatcgcgggtcgctttggcgggtgccatttcgcggaaatcgatagccgtggtattgccatttttcgagcggattaacataaaaccaccaccgcccagattccctgcctgcggatgcgttaccgccagcgcgtagcccaccgccacggcggcatcaacggcattcccgccctccttgaggatatccacccccacctgagtggcagtggcgtccacagacgctaccattccctgtttcgcgcgtaccgggtggaagacatcttcctccacaccatacgagacgggcggcgcaggaggcgcggcggcggcgctaaaacaacttcctgagagcagagcagcaatggccacccggcgtaaaaacgtcggttttatcatcgttattctccagagattaaggggcaaccccagctaagcctggtatataactctgaattaatcatcgttttgtcgggaagcgagtaaacttaaaggatatcttcagaggaggatacgcgatgaaacgacttctgattcttacggcactcctgccgtttgtcggctttgcacagcccattaatactctgaacaaccctaaccagccggggtatcagatacccagccagcagcggatgcaaacccagatgcagactcagcaaatccagcaaaaagggatgctgaatcagcaactgaaaacgcaaactcagttgcaacagcagcatttagaaaaccagataaacaataattctcagcgggtgttgcagtcacagccgggggagcgaaatcccgcccggcagcaaatgctgcccaacaccaacggcgggatgttaaacagcaaccgtaatccggatagttcgttgaatcagcagcatatgctgccggaaaggagaaacggcgacatgctgaatcagcccagcacgccgcagcctgacattccgttgaaaactattgggccgtaaagttcggaccaatcacgtcaatcgcatcggtacagatgcaatccacgccccagcgcagcaactctgccgcgcgctggggtttattgacggtataaaccagaatccgtaatccggcgtctttcaactgcatcactcgcgctttatcgagtaacttatgattgagatgaatagagacgcagcccagccgcgcggtcagttcgcgccagtcgtcgcgccactcatcaagcaataaaccacgcggcagttccggtgccgcctgttgtgcagcttctaaagcatcaatctcaaacgatgacagcagcggcggcgtcataccggcccacagttggcgtgccgccagcgccaccattttgcccgttaatggtccagtgccagtggtgggtttgatttcgatattcgccatcatcccgtgttcgcgacagcgttccgccacctgcgaaagcaacggcagcggctcacctttaaacgctttgctgtaccaactgcccgcatccacgcgcagtaaatcctgccagttcagttcacccgcgacgccccagccgttgctggtgcgttcgagattgtcgtcatggagcaggaagatctcgccatctttcgataacttcgcgtcaaattcgatcatcttatgaccgtattttgccccgacgtcgattgccgccagggtgttttccggggccagcttaccgccgccacgatgagcgacgatgcggggataaggccagttactcatactcgttgtcctgtttcaccatcaaaaagatgcagctgattttccgccaaatgcagccacagcgtgctgcctgccgtcgggcgctcctgatgcgccagtcgcaccaccagcttctgctcgccccagcgtccgtgcgccaggttatctgcgccgaggatctccagcgtgtccatcaccagcggcacaccaccttctgcctgcgagcttagcgctatatgttccgggcgaatgccgagagtcattttacgcccggcatactgacggtagccaccgtttagcggtagcacgataccgccgtccagttcgaaatgcgtgccttcattattcacgcggcctgtcagcaggttcatcgccgggctgccgataaaactcgccacaaacaggctggcgggcttttcgtagacttcaactggtgtgccaatctgttcggcaacgccaccgttcatcaccattactcgctgggcgagcgtcatcgcttcaacctgatcgtgagtaacgtagagtgaagtcgttttcaggcgacggtgcaactgttgcagttcaagacgcatctgcacgcgcagcttggcatcgaggttagagagcggctcatcaaacaagaacaccgccggatcgcgcacaatcgcgcggcccatcgccacacgctggcgctgaccgccggatagctcacgcggacgacgcttaagcagaccgtccagttccagaatgcgcgccgcttctttaacgcgctcggcaatttgctgcttgcccatgccgcgaattttcagcccccacgccatgttctcctctacgctcatatgcggataaagcgcgtaattctggaacaccatcgcaatcccgcgatctttcggctccatttcggtcacgcgctggtcgttgatccagatatcgccttctgtcacccgctccagcccggcaaccatgcgcagcagcgtcgatttcccgcagccagacggcccgaccatcacgataaattcgccatccgccacatcaagggtcagcggtttaatgacctgggttttgccatcccagcttttggttactgcctgtaatttcagtcctgccatcttatttctcactatcgaccaggccgcgcacgaaggcacgctgcatcactaaaacaatcaccaccggagggataagcgttaacaacatcgccgccattaccgagttccattccgtggtgccttcgcctgtagcgatcatccctttgatccctgccacggtggtgccgagatcaacgtcggtaataatcaacaacggccacaaatactgattccagccgtagataaaggtgatcacaaacagcgccgccagattagttttggacaacggaaaaacgatgtcgcaaaagaaacgcattggtgacgcgccgtcgatccgcgcggcttccaccaattcatccggtagggtcataaagaactggcggaacagaaacgtggcggtcgccgaggccatcagcggcagcgttaaaccggcgtagctgtcgagcattttcaggttggcgatgacttccaccgtcgggaagatacgtacttcaaccggcagcatcagggtgataaaaatcatccagaagaagaggttacgtagcggaaaacgaaaccagacaatggcaaatgccgagagcatcgagacggtaattttgccgagcgtaatgctgaacgccatcacaaagctgttaagcaacatccgccagaacggcgcgctattcgtgcctaccccgttaacccagatgttgtggatattttccagcagatgtgtgccggggatgagcgtcatcggcgcggcatagacggcctgtttatccagcgtcgccgcgacaaacgccacgtacagcgggaagaggatcaccgcgatcccgaggatcagcatggtatggctgaatatcgtcagccacggacggttctcaatcattggtaacgcaccttgctttcaacatagcggaactgcaccaccgtcagcacgatgacgaggaacatcaacaccaccgactgcgcggcagacgaagccagatccagtccggtaaagccttcgcggtagatcttataaatcagcgtagtggtggcctgaaccggcccgccggacgtggcggcgtcgatcaccgggaaggtgtcgaagaaggcgtacaccaggttcaccaccagcaggaagaaactcaccggagcgataagcggcagagcaatcttaaagaagcggcgaatcggccctgcgccgtcaatagctgcggcttcaatcaacgaacggggaatggagtgcagcgcggcatagaagaacagaaagttgtagctgatttgcttccacaccgaggcaaacaccaccagaaacattgcctgaccgctgttttgcgcgtggttccagtcgtagccgaactcagcgagaaaatgggtgatcagcccgcgaccggggttaaacaggaagatccacaatacggcggcaacggcgggagccacggcatacggcagcagcatcaaggtttgatagaaacggctgccgcgcacgatgtactccaccagcgccgcaaagaacagcgataccagcaaaccgctgacggtgacaaaggtgctgaattttatcgtcgtccagaaggagtctagatagtagctgtcatggaacagcgtgacgaagttatccagaccgacaaactggctggagaaaccaaacggatcgacgctttgccgcgagtaccacaacgcttcgcccgcaggccagataaaaaagataacggtgatgatgagctgcggcgcgaccagcagataaggcagccagcgcgagcggaacaccggacgggatgatgacattacggttaattcctgaactgtgccggatgcgcttcgcttatccggcctacacgcgatgccaggtcagataagcgaaacgcatccgacattacactgattaagacttcgtcgatttctcaaagcggcgcagcaactgatttccacgctcaacggcggtatccagtgcctgctgtggtgtcttcttaccggtccacacgctctccagctcttcatccacaatcacgcggatctgcggcatgttgcccagacgcagccctttggtgaacggcaacggcggcttattcagcatctgacgcgtcgcggtatccgcccctgggtttttctcataaaagccctgctcacgggtcaggtcatacgctgctttggtgattggcagataaccggttttctgatgccactcggcagcgttttctggcttcgcgaggaagtcgaggaacttcgccacgccggtatacgtttctttatttttgccctgcatcacccacaggctggccccgccgataatggcgttttgcggtgcatctttcgcatcggcgtcgtaaggcatcatgcctacgccatagttaaatttggcgtactcacgaatattagcgagagaaccggaagaggcggtggtcatcgcgcaatcaccgttatagaacttctcggtggattcatccttacgaccgacgtagctgaagtcgcccttcttgttcatctcttcgagcatggcaatgtgtttcacctgctccggcttgttgaactccagcaccgcgtccgtgccgtcaaagccgttgtttttgctggcaaacggcagaccgttccaggcgctaaagttttccagttggatccagccctgccagccgctggcgtagccgcacttcataccggaggctttcagttttgcggaagagtccgccagatcctgccaggttttcggcggctgttccgggtctaaccccgctttcttgaaggcgtctttgttgtaatagagaacgggagtcgagctgttgaatggctgggagagtaagtggcccgttttgctgtcggagtagtaaccggaaaccgtcggcacaaactgcgactcatcgaattgaatccctgcctctttaaacacgtcatataccggtttaatggctttcgatgccatcatggtggcggtgccaacttcataaacctgcaagtaaggtgtcagaaagatgacaaggcggtgacggcgtgggtgagggaaaatgggagatggggcacggataagcggaaaaatagaaggtctgaatcaaactctacagattactcatcgtttcatgccggatgcggcgtaaacgccttatccggcctacaagatcgtgcaaattcaatatattgcaactcacccagtaggcctgataagcgcagcgcatcaggcaattttacatttgtcacctgtctcaaaggagtcttttgactccttatcaatcaacgtgttattacccgcctaaatacgcacttctcaccgcttcattcgccagtagtgcatcaccagtatcggagagcaccacatggccgttttccagcacgtagccgcgatccgccagctttagcgcctggttggcgttctgctcgacgaggaagatagtcatcccctgctcgcgcagctgctcgatggtgtcgaaaatttgctggatgataatcggcgcaagaccaagcgatggctcatcaagtagcagcaaacgcgggttgctcatcagcgcgcgaccaatcgccagcatttgttgctcaccgccggacatggtgcctgcccgctgaacacggcgctcatgcagacgtgggaacagttcatacacccactttatgcgctcctggaactggtcgcgttcggcaaaaaagccgcccatcgccaggttctcttccaccgtcatccgcgagaagacgcgacgcccttccgggacaatcgctaccgcttcgcgcatgattttcgccgtctgccagtcggtaatgtctttatcatcaaacacaattcgcccgctggtagcgcgcggatcgccgcataacgtgccgagcaaggtggttttccccgccccgttcgcgccaatgagggtgacaatctcgccctgattgatatgcaggctcacctcatgcagcgcctggattttgccgtagtgggcgctgactttgtcaaaggacaacatgactttttccatcttatgcctcacctaaataggcacggatcacgtccgggttattacggatttgctccggcgtaccgtttgccagtggcgtcccctgattgaccacataaattcggtctgaaatccccatcaccagcttcatatcgtgttcaatcaacaagatagtggtgttgtgatgattgcgcagttcggcaatcagctcatccagctctttggtttcttttgggttaagacctgccgccggttcgtcgagcattaaaatctccggctgcgtcaccatgcagcgggcaatctccagacggcgttggtcaccataggccaggttactcgcctgacggttggcgtgttccagcaaaccaatgcgctcaagccaggtggcggcgcggtcgagcgcttcgctctgggcgcgacggaaagaaggcgttttcaacaggccagagaacagcccggttttcagttgttgatgctgcgccaccagcaggttttcaattaccgtcatttcacggaacagacgcacatgctggaaggtgcgcaccacgcccatgcgggcaatttgctgccccggtaaaccttccaggtgctgattgcgcagtaaaatggtgccgccggtgggtttgtagaatccggtcagacagttaaaaaccgtagtttttccggcaccgttagggccgattaacgagacgatctcctgcgggtacagttcaagattgacgttgttcaccgccagcaggccgccgaagcgcatcatcaggccgttcacagataataatggctgactcatgcctgctctcctttcgctgcgccgtttttcagcttcagttgcgggcgcgtcatgggcagcaagccctgcggacgccagatcatcatcagcaccatcaaaccaccgagcattaacatgctgtattcgttgaaatcacgcatcaattcgcgcgataccaccagcaaaattgccgccagaatcaccgcaaactgcgatcccataccgccgagcaccactatcgccagtacaaacgccgattcagcaaaggtgaaggattccgggctgacaaagccctggcgcgcagcaaacagcgttccggcaaaaccggcaaacgcggcactgatggtaaaggcagtcagcttgatacgacgcgggcttaagcccagcgaacggcaggcgatctcatcttcacgcaacgcttcccacgcacgccccagcggcatccgcagcaggcggttaatgacaaacaggcttagcaccaccagcagcaacgccaccagatacaggaagatgacgcgatcggagggatcgtatttcaggccaaagaaattactgaacgtgtcccaaccgccttcacgggcggtacggctgaactcaaggccgaagaaagtcggtttcgggatctgactgataccgttcgggccgccggtaatttcggtgttattgagcagcaatatgcgcacaatttcgccgaaaccgagggtaacgatcgccagataatcaccgcgcagacgcaacaccggaaaaccaagcaggaagcccgccgccgctgccatcagtccggcaatcggcaaacaggtccagaaccccagaccgtaatagtgattgagcagcgcaaaagtgtaagcgccgatggcgtaaaaaccgccgtaccccagcaccagcagaccagaaagaccaacaaccacattcagcccgagaccgaggataatgtagatcatggtcagagtggcgatatccaccgtcccacgtgacaccataaacggccacgacaccgcaagcaccagcagcgccacgaggaacagtttctgcttcaccgtggagccatcaatcgcgggcagaataaacttcggcccggaaacgctttttagccctttctggaaagcaggtcgcaaaagctggaagaaaaagaccaccgccgtgccgataaacacccactgccaacggacatccgaagcgctgtcgaccaccagtttggtgccatccagctccagttgcacgcccataaagacgccagcgaggacaaagaacatcgcggcagagagcagtgccattgcaatatgcatcggtttcatactttctctacctccgggcgacccagaataccggtcggcatcaccagcagcaccagaatcagcagggcgaatgagaccacatctttatattccgtactcagataggcagaagagagcgcctccgcaatccccaggatcagcccgccaatcatcgcccctggaatgctgccaatcccaccgagcaccgcagcggtaaaggctttcatcccggccataaagccgatataggggttaatgacgccgtagaactgaccgagcagtacgccagccactgccgccatcgccgcgccaataacaaaggtcaaagcaatcacccggtcggtgttgatgccaagcaggctcgccattttcagatcttccgcgcaggcacggcaggcgcgccccatacgggaataacgaatgaaaatcgtcagcgccagcatggcgaggaaagtaacaatccagatcactgcctgcatggtggtaatagaggcagagaagttttcgctatgccccaccacccactgaccgttaaacagactgggcagcgccacgtcacgcgaaccttcggtcaggctaacgtagttttgcaggaagatggacatgccgattgccgagatgagcgcaatcaggcgcttagagttacgcaccgggcgataggctacccgttcgatactccagccgtaggcgctggcaatgacgattgcgccgacgaatcccgccgccaccagcagccagccggtatcaatgcccatcatcatcagtgcggcgatgatcataaaggagacatagctaccaatcatgtaaacctcgccgtgggcgaagttgatcatgccgataatgccgtaaaccatggtgtagccgatggctatcagcgcgtaggtactgcccagcgtgacgccgttaaacatctgctgcaagaaatataaaaactgctcagacataaggtaacctttctaaacccgcccgcatttcacgggcggtgggatgatcacttggctgccgtggatgaaccatcggcgtgccactggaagacaccaaaatcaaatcccttaagatcgcctttttcatcccagttcagcggcccaatcacggtgtttgcaccgttagcttttaaatctttcaccagcgccagcggctcatcgctgccagtacgctcaagggcagtcgccagagattgcaccgccgcgtaggtgatccagacataaggcccggacggatctttcttgtctgctttcagcgcatcaacgatgccctggtttgccggatcctggtcatagcgttttggcatagtgaccaacatgccttcggcagcatcgccagcaatattcgacaatgatgcgttacccacaccttccggccccataaactgagttttcaggccaacggaacgggcctggcgcagcatctgccccatttccgggtagtaaccgccgtagtaaacgaagtcgatgttttcttttttcaggcgggcgatcagcgcggagaaatctttctccccggcggtaataccgtcgaagaagacgacgttggcgttagccgctttcagcccgtcctgcaccgaacgcgccagcccttcgccatactgttgtttgtcgtgaatgatggcgatgcgctggggcttcaccgtctcaagaatgtattttgccgccgttggcccctgggaagagtccagcccggcagtacgcataatgtgttgataaccgcgttgggtcagctccgggttggtcgctcccggcgagatcatcagaataccttcgtcttcgtagatatctgatgcaggttgggtagaagaagaacacagatgaccaataacgtatttaatgccgtcattaacgattttgttggcgaccgcaacggcttgtttcgggtcgcaggcgtcgtcatattccacgccaaccagcttgtcgcccttaattccccctttggcattaatgtctttaatcgcctgacgcgcgccgttaaattccatatcgccccactgggcaatcgggccggacatcgcgccgacaacggcgactttaatatcgtcagccatagcggtgtgtgaaattgccagtgcaatcatccctgcgatgatagttttcgcattccgtttcatagtcaaaaatccccattcgtgatgttgtgttgctttgtttttatgtgttaacaaatcagactgttctttttttatactgcactgtttttgcctgtctgattaagggtttagcgcagtattttgtgataacagtgattaaaatccctatttttcagtcgattaagaacagataatattctgaatttattgatagataaacagaaaaaagtgcctttgtcagcataaaataacggcacaaagggcggaataattcactaccattcaggggattatgctgggtatttttcattctctaatgttttaactttgtaattattgctgttaaaaaattaatcacctgccaaaagaaataaaaaagagaaagcctccgattaaattatttcgctacactggttccacttttgtgatttacacgggttacccatgaagctgaccatcattcgattagaaaactttagcgaccaggaccggattgacctgcaaaagatctggccggagtattccccttcctctttacaggttgacgataaccaccgtatctacgccgcgcgttttaacgagcgcctgctcgctgccgtacgggtaaccttaagcggcaccgagggagcactggattccctgcgtgtgcgggaagtcacccgacgtcgcggtgtggggcaatatctgctggaagaggttttgcgtaacaatcctggcgtttcatgctggtggatggcggatgcaggcgtggaagatcgcggtgtgatgacagcgtttatgcaggcactgggatttacggcgcaacagggcggctgggagaagcgttaatcgtcaagttgatttcaaaagtgatgaccaacgagaaattgcctgatgcgctacgcttatcaggcctacaatgtgtgttgcaatttactgatttctttggatcttataggccggataaggcgtttacgccgcatccggcatgaagcaacgtactcgatattagcaatttggcggcaacccaaagttgccgattaatgattacttcgcatctgtcgccgtgccgttggcgtgccagtcaaatacgccgaactcaaagcctttcagatcgcctttctcatcccacgtcagcggtcccattacggtatccacggagttcgctttcaggtatttggcgatttcagccggatcgtcagactgattcaggcccgcctgcaaagattgcagcgcggcgtaggtggtccaaacgaatgcgccgcttgggtcctgttttttcgctttgatcgcgtcaacaatgggtttgtttgccggaacctgatcgtagttcttcggcttggtcaccagcagcccttccgctgattcgcccgcaatgttagacagcgaaacgttagccacaccttccggccccataaactgagttttcagccctgccgcgcgtgcctgacgcaggatttgccccatttccgggtggtaaccgccgtagtaaacgaagtcgatattctctttcttcagacgcgccaccagcgtagagaaatctttttccccggcggtgataccatcaaagaacaccacgttagcattgcctttcttcaggccgtcctgcaccgctcgtgccagaccttcgccgtattgctgtttgtcgtgaacgatagcaatacgctgcggtttcactttctcaagaatatatttcgccgccgtcggcccctggtcggagtccaggccggtggtgcgcaggatcagctgatagccacgggcggtcagctccggcgcggttgccgctggggtgatcattaaaatgccttcgtcttcgtagatgtcagacgcaggctgcgttgatgaagaacagaggtgaccaatcacatatttaatgccgtcgttaacgactttgttcgccaccgcaaccgcctgtttcgggtcacaggcatcgtcatattttacgatttgcagtttgttgcctttaatgccgcctttagcgttgatatccgcaaccgcctgctctgcgccggtaaactcttggtcaccgtactgcgcaaccggaccggacattgcgcccacgaccgcgactttaatatcttctgccagagccatattgctgaatgccagcgcgatacatcctgccagtaacgctttaccctttatgttcatcctgagaatccccattcttctggttattacgtgtgttgtgatgttgttgttcagcactttatttcgttttatgcatggctacccgtgctttagcagcatactctgctaaaacatacccgatttttatgatattggaatagctattttgacagtttattaacaatctgcgtggggattggcgttttgccggaggggaaattgattattgtagaggcccaaaaaacaaaaaccccggactcgcatccagggttctctgcttaatagcggaaattacgcttctatagcagcgcgcagttttttcatcgcgttcttttccagctggcgtacacgttcagcggaaacaccgtaacggtcagccagttcctgcaacgtggacttgttgtcttcgtccagccagcgcgcgcggatgatgtcctggctgcgttcgtccagaccttgcatcgcgtcggtcagacggtttgccgcctgctcttcccagttatcatcttcgatgccgtcggcaaagttagatgatttatcctgcagatagagcaccggtgccatcggctggctgtcggaatcgtcgtcggaagacaggtcaaaggtcatgtcctgtgccgccatacgtgattccatctcacgaacgtctttgctggttacgcccagttcacgggccaccatttcgacttcatcctggttaaaccagcccagacgctgcttggttttacgcaggttgaagaacagtttgcgctgcgctttggtggtcgcaactttgacgatacgccagttacgcagaacgtattcgtggatctctgctttgatccagtgaacggcgaaggagaccaggcgcacacccacttccgggttgaaacggcgcactgctttcatcaggccgatgttaccttcctgaatcaaatccgcctgtggcaggccatagcccgcataattacgagcaatatgaacaacaaaccgcaggtgagacaggatcagcgttttagctgcttccagatcgccatggtaatgcagcttttcagccagcgcccgctcctcgtcagccgacaacatcggccacgcgttagctgcccggatgtaggaatccaggttgccaactggggctaaagctaaactttgcattttgtcagtcattcaaatcctctcaatcgatatcttctggcgcttcagtggtagcaacaactgtgccagagcttaagagcaacgaggttatcatccactgttttatcagacagtgattttatccacaagttcaatgcaagcttgtgaataaattacgcacaaaatgtgacatagagatgaaataccgggaagagacaacgggatctctttccctgctacggaacccattgcagggaaagagtataacacgcttttattattcaggcgtaaagtggcgtaaatgttgtaccgtggcaagccacgctgccacccagccaatcatcgagcataccagcagcaatagcaggcattcatcgaacgataaaccattgatatcaaacttcgttccgaaaacctgtgccacttccgcaaccgccgatgacaatcgcagcaccagaatttctgacaaaattaatgacaacaatgcgccagaaaatcccagcagtgcgccaccatacaggaacgggcgaaggatgaaaccatccgtcgcaccaatcagtttctgcacgttgatggagtcacggcgagcaaagatgctcagacgtacgctgttgccgatgacgaggaacactgccgccaccatcaacacgccgatcatcgccgaaacgcgcccgaccagcccggtcaacgccgccagacgggcaaaccagctgtcatccatccgcacttcgtcaatgccgttaatctgcgtgatacgatcacgcagcgtattgagtgattccgtcccctgaaaatcgagtttcgggatcaccaccgccactgccggaagcgggttttcttccagcatatccagcgcaccaccaaaaccagaccagttacggaactcgcccagtgcgtcttcacgagaaagatagttcactttctccacgccttgctcggcctgcaactgtgccaccacgcccgcagcggcgtcatcgtccagcgttttttgcaagtaaacagtgatttgcggtgacggataatactgcgtcgccgcctgattaacgtttttgtacaccatataacagacgctgggcagcgtcagggagatggcgataaccatcaccgttaaaaacgtggcgaacggtttgcttttcagatcctgcaatgcgccgtggaaggcatagcgcacctgttcgttgaaaacgttggttttgcgatttaccggttttggcgaggatttcgcgcgtttcggtgcgttacgaccgccgtcgcctgagccgccgaccgatttacggaagcgatccagacgcccaccaaactgccgaatatgattgattgcatcgcgcttattcatggcccacgcctccatgcaagtgaccatcgctcagggtgagcatgcgatgggaacgccgtgaaatcaggttgatgtcgtgcgttgccatcaatacggttaccccaacgcggttaaactcttcaaacagacgtagaatcccttccgacaacgcgtcgtccaggttaccggtcggttcgtccgccagcagtaccgcgggcttattcaccaccgcgcgggcaatgccaacacgctgttgttcaccgccggaaagctgaatagggaagttcttcgctttgtccagtagcccgactttatccagtgccgccgacacccggcgacgaatatcgtcaccgctggcaccagcgataatcagcgggatcgccacgttatcgtagacagtacggtccatcagtagatggtgatcctggaaaatcatgccaatctggcggcgcagaaacggaacttcacggtttttcagacgcgtgatgtcatggccgctaaaccagattttcccggcgctgggccgctcaatcccacagatcagcttcaggagggtacttttccctgcgccggaatgaccggtcagaaacgccatctcacccggctgcatatggaacgtaacgccctgcagcgcctgtctcccaccgagataagccttgctgacatgttcaaagcgaatcattgttaatcctctcgggcaaaaagtgcctctataaagtcgtccgccttaaacggacgcaaatcctcaatacgttcgccgacaccaatgtagcggatagggataccaaactggtcagccaccgagaaaattaccccgcctttcgccgtgccgtccagtttcgttagcgtgatgccggttaagccaacagcttcgtggaacagtttggcctggcttaccgcgttctgcccggtgctggcatcaatagtcagcataacttcatgcggcgcttcaacgtcgagtttcttcatcacgcggacgattttcttcaactcttccatcaggtgcgatttgttctgcaggcgtccggcggtatcggcaatcaggacgtcgatattacgcgctttagctgcctgaatggcgtcgaagataacagaggcggaatccgccccggtatgctgggcaatcaccggaatattgttgcgctgaccccagacctgaagctgttcaaccgctgctgcacggaaagtatcgcccgccgccagcatcaccgatttaccctgctgctcaaactgacgtgccagcttaccaatcgtcgtggttttacccacaccgttgacgcccaccatcaggatcacgaacggcgttttaccttcaacattcagcggctcatcgactttcgccagaatctcacccatctcttctttcagcaggccatagagcgcctcggcatcacgaagctgcttgcgggatgcgccttccgtcagattggtgataattttacgtgtggtttccacgcccacatcggcgatcaaaagctgctcttccagctcctcaaacagatcatcgtcgatttttttaccgcggaacaggctgataaatccggaaccgagattttctttggtttttaacaggctgcgtttcaggcgcgcgaagaaaccttctttggttggtttttcctgctcctgagcgatttcttccaccggctgctcttcttctgccggaggaaccaccatcaccgcctcttctgctgcttcggctgccagcgcctgtgcttccagctcttcgtcggtgatttcttctttagccgcttcttcttccgccgctttgacaatctctacggtttccgcttcagcctgccactcttctggcgaaacctcttcggcgttgacgtcttccggcaacggcagctcttcacgttcgatagccactggctccggcgtttcttctacgaccggttccggctgtgcaacaacttccgcttcaggctgcgctttttcactttcaacaacctgttcagtgacttccacaacgtcggcagcaaaagtttccgcctcggcttcagtatgcgcctgcggctgctcttcaacggcttgttccgaagccttcacaggctcttgcgcctgaacgatttcttctacaaccggttgttcattctgaacttctgtctctttttccggggtctgctctttttgaccaaagcccagccaggaaaaaaagccacgttttttttctttcgccatttgcgactacactcctcgctgttgcttcatggcacagcgttaacgctatgtacatagcagctaaaaaaatgatgaaatagtctatcacttaacttaattcacatcaccgcctgcaagtatgtgttatctggcggattgagcaatttatcatgaaaaaaccgaatcattccggcagcggccaaatccgcattattggcgggcagtggcgaggccgtaaactcccggttcctgatagcccaggtctgcgccccaccaccgaccgcgtacgcgaaacgttgtttaactggctggctccggtcattgttgacgcccaatgtctggattgcttcgccgggagcggcgcgctggggctggaagcgttatcgcgctacgctgcgggggccacgttaattgagatggatcgtgcagtttctcagcagttaattaagaatctggcgacactaaaagcaggcaatgcacgcgtggtgaacagcaacgcgatgtcattcctggcgcaaaaaggcacaccgcataatatcgtgtttgtcgatccaccgttccgccgtggcttgttagaagagacgataaatttactggaagataacggctggctggctgacgaagccctgatttatgtcgaaagcgaagtcgaaaacggtctgcccaccgttccggcaaactggtcgttacatcgggaaaaagtggcgggtcaggtggcttatcggctgtatcaacgcgaagcacaaggagaaagtgatgctgattaatattggtcgtttgttaatgctctgcgtttggggatttttaatcctcaatctggtgcatcccttcccgcgcccgctaaatattttcgttaacgtggcgctgatttttaccgtgctgatgcatggtatgcagctggcgctattgaaatccactttaccgaaagatggcccgcagatgaccaccgccgaaaaggtacggattttccttttcggcgtgtttgaactgctggtctggcagaagaaatttaaagttaaaaaataaccttattgttcgccaacaaagctaacaaagcgcgttcctttatagctcagcgtacctttatcgcccactgtcagggcgtggtactgctgggcgtcgaggcgaaacgtctgctccattcctccgctttgcggtttgaagcttgcctcgtagcgcatactggtgcctgccggagtcacttcctgctggcgcgaacggcgatcgttaatcggtttttcccgcttgttgctcaccaccaccagcttttgctggagcggagccatatcattatcagctttttcccgtcgctgttgcataaaacgaaacgatgcggcgacgacaattaagccaatgataacaataaagaaaagaggtggtttgctcatctttatccctcatcggaaaatgcggaaataagcataccctgccagttatggtgttgtcatccgtccaccctcgccactaaactggaagcaagaccgtaggcattccgcttacgaaaaaataacgaattcaaggaactaagatgctttggtcgtttatcgctgtctgtctttccgcatggctatctgtggatgcatcgtatcgtgggccaacctggcaacgctgggtgtttaaaccgttaacccttcttctcctgctgttactggcctggcaagcgccgatgttcgacgccattagctatctggtgctggcagggctgtgcgcctcactgctgggcgatgcgctaaccctgttgccacgtcaacgtctgatgtacgccatcggcgcgtttttcctctcgcacctgctgtacaccatctatttcgccagtcagatgacgctctctttcttctggcctctgccactggtgttgctggttctgggtgcgctgttactggcgattatctggacgcggctggaagagtatcgttggcctatctgcacgtttatcggcatgacgctggtgatggtgtggctggcaggtgaactgtggttcttccgtccgaccgctccggcgctctctgcgtttgttggcgcttcgttgctgtttatcagtaactttgtctggctggggagccactatcgccgacgcttccgtgcggataacgcgattgctgcggcctgctactttgccggtcacttcctcatcatccgctcactgtatctctgataaaacttgactctggagtcgactccagagtgtatccttcggttaatgagaaaaaacttaaccggagtatgccatgtcgacacctgacaatcacggcaagaaagcccctcaatttgctgcgttcaaaccgctaaccacggtacagaacgccaacgactgttgctgcgacggcgcatgctccagctcgccaacgctctctgaaaacgtctccggcacccgctatagctggaaagtcagtggcatggactgcgccgcctgtgcgcgcaaggtagaaaatgccgtgcgccagcttgcaggtgtgaatcaggtgcaggtgttgttcgccaccgaaaaactggtggttgatgccgacaatgacattcgtgcacaagttgaatctgcggtgcaaaaagcgggctattccctgcgcgatgagcaggccgccgacgagccacaagcatcgcgcctgaaagagaatctgccgctgattacactaatcgtgatgatggcaatcagctggggtctggagcagttcaatcatccgttcgggcaactggcgtttatcgcgaccacgctggttgggctgtacccgattgctcgtcaggcattacggctgatcaaatccggcagctacttcgccattgaaaccttaatgagcgtagccgctattggtgcactgtttattggcgcaacggctgaagctgcgatggtgttgctgctgtttttgattggtgaacgactggaaggctgggccgccagccgcgcgcgtcagggcgttagcgcgttaatggcgctgaaaccagaaaccgccacgcgcctgcgtaacggtgagcgggaagaggtggcgattaacagcctgcggcctggcgatgtgattgaagtcgccgcaggtgggcgtttgcctgccgacggtaaactgctctcaccgtttgccagttttgatgaaagcgccctgaccggagaatccattccggtggagcgcgcgacgggcgataaagttcctgcaggagccaccagcgtagaccgtctggtaacgctggaagtgctgtcagaaccgggtgccagcgccattgaccggattctgaaactgatcgaagaagccgaagagcgtcgcgcccccattgagcggtttatcgaccgtttcagccgtatctatacgcccgcgattatggccgtcgctctgctggtgacgctggtgccaccgctgctgtttgccgccagctggcaggagtggatttataaagggctgacgctgctgctgattggctgcccgtgtgcgttagttatctcaacgcctgcggcgattacctccgggctggcggcggcagcgcgtcgtggggcgttgattaaaggcggagcggcgctggaacaactaggtcgtgttactcaggtggcgtttgataaaaccggtacgctgaccgtcggtaaaccgcgcgttaccgcgattcatccggcaacgggtattagtgaatctgaactgctgacactggcggcggcggtcgagcaaggcgcgacgcatccactggcgcaagccatcgtacgcgaagcacaggttgctgaactcgccattcccaccgccgaatcacagcgggcgctggtcgggtctggcattgaagcgcaggttaacggtgagcgcgtattgatttgcgctgccgggaaacatcccgctgatgcatttgctggtttgattaatgaactggaaagcgccgggcaaacggttgtgctggtagtacgtaatgatgacgtgctgggtatcattgcattgcaggataccctgcgcgccgatgctgcaactgccatcagtgaactgaacgcgctgggggtcaaaggagtgatcctcaccggcgataatccacgtgcagcggcggcaatcgccggggagctggggctggagtttaaagcgggcctattgccggaagataaagtcaaagcggtgaccaagctgaatcaacatgcgcccctggcgatggtcggtgatggtattaacgacgcgccagcgatgaaagctgccgccattgggattgcaatgggcagtggcacagacgtggcgctggaaaccgctgatgcagcattaacccataaccacctgcgcggcctggtgcaaatgattgaactggcacgcgccactcacgccaatatccgccagaacatcaccattgcgctggggctgaaagggatcttcctcgtcaccacgctgttagggatgaccggcctgtggctggcggtgctggcagatacgggtgcgacggtgctggtgacagcgaatgcgttaagattgttgcgcaggagataaggcaaaccgatcgcaacattgagcgcgatcggtcccctcgcccctctggggagagggttagggtgaggggaaaaggcggcatcgaagccaatctttccccatcaaccgcctttacgaatcaaataacgataaggcagtccatccgtctctttcgcaaccagttcgtgttccataaaggtacaaaacccaggaatatcgcgggtagtggccggatcgtcggcgataatcagcaacgtttcgccaggctgcatattgcgcacagttttgcgcaccatcattacgggttccgggcagcgcaggccaagtgcgtcgagtgtgtggtcagggctggaaaagagatcggtcattttcttctcatcacataaaaaaacggcgctagtttacgccctgtgagtccgtaagcaaaccaggttaacgattgcgtgaaaattaaccattgcattgtcaacgtaaagcagtatcatgcggcggctcgaaaaaagggtaagcacgttattatgttaaggtaacagacgtgtcgtacgtattgggttccctcaccccaatggttaatcaaaaaggtacaatatgaacgttttctcgcaaactcaacgctataaggcgttgttctggttatcgttatttcatctgctggtgatcacctccagtaactatctggttcagcttcccgtctccattttgggtttccataccacctggggcgcgtttagcttcccgtttattttccttgctaccgacctgaccgtgcgtatttttggcgcaccgctggcccgtcgtatcatctttgcggtgatgatcccggcgttgctgatctcctacgtcatctcgtcgctattctatatgggttcctggcagggattcggcgcactcgcccacttcaacctgtttgtcgcccgtatcgccaccgccagtttcatggcctacgcgctgggacagatcctcgacgtgcacgtttttaaccgcctgcgtcagagtcgccgctggtggctggcaccgacagcgtccacactgttcggtaacgtcagcgacacgctggcctttttcttcattgccttctggcgtagcccggatgcctttatggctgaacactggatggaaatcgcgctggtcgattactgtttcaaagtgttaatcagtatcgttttcttcctgccaatgtatggcgtattactcaatattctgttgaaaagactggcagataaatccgaaatcaacgctttgcaggcgagttaaaggttcgttatcagagttgtgataagatggatgaatgagccgttatggccgtttatcgaaaggaagaagtcaatgcgcaatctggttaaatatgtcggaattggcctgctggttatggggcttgcggcctgtgatgataaagacactaacgctacggcgcagggttcggtcgcggaaagtaacgctaccgggaatcccgtcaacctgcttgatggcaagttaagtttctcgctgccagcggatatgaccgaccagagcggtaagctgggaacgcaggccaataacatgcatgtctggtccgacgccaccgggcagaaagcagtcatcgtcatcatgggcgatgatccgaaagaagatctggcggtgttggcgaagcgtctggaagatcagcaacgtagccgcgatccgcagctgcaagtggtaaccaacaaagccattgagctgaaaggtcacaaaatgcagcagttagacagtattatctccgcgaaaggccagacggcgtactcttccgttattctgggtaacgtgggtaatcaactgctgaccatgcaaattactctgccagctgacgatcagcaaaaagcgcagaccaccgcagaaaacatcattaatacgctggttattcagtaagttttaagatgatgaggcggcctcagggacgtgttccggaggccgtttttttaatcgccacgtcagtaataacgcgattgcgaccagtcccgccgccgccagataaatcaccggtacgcccgcccagctcatcaccagcccagccagtggtccggtcacgccaagcgataaatccataaatacggtgtaagttgccagcgccgccccctgattttgctgcggaaccgcttttaccgccactacgcccaatgccgggaacaccagcgaaaaccctgcccccgccagtaagacgccgactttcgccatccacggcatagtcgccacgccaaccagtagcaggccgattatctcaacgctaaagcaaatcatcgccacgtttaagccgccgatacggttaatgccgttagggaataacaaacgcgtaccgacaaacgcacagctaaacagcgtcagcgcgaaagccgcaccgtcccaacctttagcgtcataaaacagcgtgataaaggtggcgatgacgccaaatccggcagaagccagtgccagtgccataccgtacagccagacgcgcccaagcaccgcgcgaaacggcagcggtttgcctttactggcttttaccgtcggacgcgggatcgccaacaaaatggccaccagcgccacgcccataatgattaacgctaacgcctgcaagccgccccagtgataaaacacgacgcctaacggcgcacccatcgccatcgccccgtaattgacaatgccgttccacgaaatcactcgcccgatatgcagcgagccaaccacgccaacgccccacagggtcgatcccgttccggcaaaactttgcccaatcccaaggatcacgcgtcccaggcaaagtaataacaggctgatgacgggcagactggcggttaatcctgccgtcagatatcccagaccgctcaaaaagcagccgcataaaccgaagacgacaatctttttggggcccagcaaatcggcgtaacgtccggcatgaggacggctcagcaaggtggcgaaatattgcaggctgataaccaatcctgcccagaaagcgctaaagcccatcacatcatggacatagcccggtaatacagcgagcggcaacccgatggtgaggtagctggcgaagttaaacatgacaatggagacaatgcgcaaattcaggcgcaatccgtttagcgcgggttcggctacgggttcgggcatgaggatcaccacatttttacaacagtgtttcatttttaccacgtgctgacgtgaaaatcagcagtaagaatcagaatattgctggcgtgactcccgctacacttaatacaaaaagtcacaaggaagccccaatggaaatccctcaacccgataaaacgggcatgcacattctgctcaagctggcctcgctggtagtgatcctcgcgggcattcacgcagcggcagatatcattgtgcagctgttactggcgctgttttttgccatcgtcctcaacccgctcgttacctggtttattcgtcggggagtacaacgccccgttgccattacgattgtagtggtggtgatgctgatcgcactaaccgcgctggtcggcgtactggcggcatcgtttaacgaatttatctctatgctgccgaagtttaataaggagctgacgcgcaaactttttaaattgcaggagatgttgccttttcttaatttgcatatgtcgccggagcgaatgctgcagcggatggactcggaaaaagtggttaccttcaccacagcgctaatgaccgggctttccggggcaatggcgagcgtgcttttgctggtgatgaccgtagtttttatgctgtttgaagtgcgccacgtcccttacaaaatgcgttttgcgctgaataacccacagattcacatcgcaggattacaccgcgcacttaaaggcgtttcgcactatcttgcattgaagacgctactcagtttatggacaggtgtcatcgtctggctggggctggagctgatgggggtgcagtttgcgctgatgtgggcagtactggcgtttttgctcaactacgtgcccaatatcggcgcggtaatttccgccgtaccgccaatgattcaggtgctgctgtttaatggtgtttacgaatgtattctggtcggcgcattgtttttagtggtccatatggtcatcggcaatattttagaaccacggatgatgggccatcgcctggggatgtccaccatggtggtatttctttcattgttaatttggggatggctgctcggcccggtagggatgctactttcggtgccattaaccagtgtgtgtaaaatctggatggaaaccaccaaaggcggtagcaaactggcgattttactggggccaggcagaccgaaaagtcggttaccgggatgaggcgacaagtgatacgatacgcactttcattttccattaaacgttggccctgatatgtatcggatagttctggggaaagtttcgaccttaagcgcagctccactgccaccgggtttacgcgagcaagcaccgcaaggtccacgacgcgaacgctggctggcggggcgtgcattgctttcgcacacgctttccccgctaccggagatcatctatggcgaacaaggcaaacctgcattcgcgccggaaacgccgctatggttcaacttaagccatagcggtgacgatatcgctctgctgttgagcgatgaaggcgaagtcggctgcgatatcgaagtgattcgcccgcgcgccaactggcgctggctggcgaacgccgtgttcagcctcggggaacacgctgaaatggacgccgtgcatcctgatcagcaactggaaatgttctggcgcatctggacgcgcaaagaagccatcgttaaacagcgtggcggcagcgcctggcaaatcgtcagcgtagatagcacctatcactcctcgctgtcagtcagccattgtcagctagaaaatttaagccttgcgatctgcacccccaccccctttacgctcaccgccgacagtgtgcaatggatcgattcagttaactgatccgcccacccgactgcccatctattgatccagaacaggtaatcagtatgacgaatacttaaaatcgtcatacttatttccgccatctattttaatccattggggttaccatgctctccacactccgccgcactctatttgcgctgctggcttgtgcgtcttttatcgtccatgccgctgcaccagatgaaatcactaccgcctggccggtgaatgtcgggccactaaacccgcacctttacacgcctaaccagatgttcgcccagagcatggtttatgaaccattggtgaaatatcaggcagacggttcggtgatcccgtggctggcaaaaagctggactcattcagaagatggtaaaacctggaccttcaccctgcgtgatgacgtgaaattctccaacggtgaaccgttcgatgccgaggcggcggcagaaaacttccgcgcagtgctcgataaccgtcaacgtcacgcctggctggagctggcaaaccagattgttgatgttaaagcactcagtaaaacagagctgcaaattaccctgaaaagcgcctactatcctttcctgcaagaactggccctgccccgtcctttccgttttatcgctccctcgcagtttaaaaaccatgaaaccatgaacggaattaaagcgccgattggcaccggaccgtggattttgcaggaatcgaaactgaatcagtacgatgtcttcgtccgtaacgaaaactactggggcgaaaagccagcgattaaaaagatcacctttaacgtcatcccggacccgactacccgcgcggtggcgtttgaaactggcgatatcgacctgctgtacggaaacgaagggttattaccgctcgataccttcgcccgctttagccagaatccggcttaccacacccaactgtcacagccgatcgaaaccgtgatgctggcgctcaataccgccaaagcccccaccaacgagctggcagtacgtgaagctcttaattacgcggtaaacaaaaaatcgctgattgataacgcgttatatggcacccagcaggtcgccgacaccctgtttgccccttctgtgccttacgctaatctcggcctgaaaccgcgccagtacgatccgcagaaagcgaaagagttgctggaaaaagccggttggacgctgcctgcgggcaaagacatccgcgagaaaaatggtcagccgctgcgcattgaactgtcgttcatcggcaccgatgcgttaagcaaatcgatggcggaaatcattcaggctgatatgcgccagattggcgcagatgtctcgctgattggcgaagaagagagcagtatctatgctcgtcagcgcgacggtcgttttggcatgattttccaccgcacctggggcgcgccatacgatccacacgccttcctgagttcaatgcgcgtaccgtcgcacgctgacttccaggcacagcaaggattagccgacaagccgctgattgataaagagatcggcgaagtgctggcgacccatgacgaaacgcaacgtcaggcgctgtatcgcgacattttgacccgtctgcatgacgaggcggtttatctgcctatcagctacatctcgatgatggtggtatcaaaaccggagctgggtaatatcccctacgcgccgatcgccaccgaaattccgttcgaacagattaaaccggtgaaaccttaatgttgcgttacgtattacgccgctttctgctgctgatcccgatggtgctcgccgcctcggtgatcatttttctgatgctgcgcctcggtaccggcgacccggcgctcgattatctgcgtttatctaacctgccgccgacgccggagatgctggcctctacccgcaccatgctcgggctggatcagccgctgtacgtccagtacggtacctggttgtggaaggcgctgcatcttgactttggtatctcattcgccagccaacgcccggtgctggacgatatgctgaacttcctgcccgccacgctggaacttgcaggtgcggcgctggtattaattctgctcacttccgtaccgctcggtatctgggcggcgcgccatcgcgaccgtctgccggatttcgccgtacgtttcatcgcgtttcttggcgtgtcgatgcctaacttctggctggcgtttttactggtgatggcgttttcggtgtatctgcaatggctacccgcgatgggttacggcggctggcagcacatcattttgcctgcggtttccattgcctttatgtcgctggcgattaacgcgcgactgctgcgcgccagtatgctggacgtcgccggtcagcgtcacgtcacttgggcgcgtctgcgcggcctgaacgacaaacagaccgaacgccgccatattctgcgcaatgcctcgctgccgatgatcaccgccgtggggatgcacatcggcgaactgattggcgggacgatgattatcgaaaacatctttgcctggccgggcgtcgggcgctatgcggtgtcggcgatttttaaccgtgactatccggtgattcagtgctttacgctgatgatggtggtggtttttgtggtctgtaatttgattgtcgatttgctcaacgccgcgctggacccgcgcattcgtcgtcatgaaggagcgcacgcgtgaactttttcctctcttcccgctggtcggtacgcctggcgctgatcattatcgccctgctggcgctgattgcgctcaccagccagtggtggctgccgtatgacccccaggcgattgatttgccgtcgcgcctgctttcgccggatgcgcagcactggctgggcaccgatcacttaggtcgcgatattttctcgcggctgatggcagcgacccgcgtgtcgctcggttcggtaatggcctgcctgctgctggtgctgacattagggctggttattggcggcagcgccgggttgattggcgggcgcgttgatcaggccaccatgcgcgtcgccgatatgtttatgaccttcccgacctcgattctgtcgttctttatggttggcgtgctcggcaccgggctgaccaacgtaattatcgccatcgccctgtcgcactgggcgtggtatgcacgcatggtgcgcagcttggtgatttcactacgccaacgcgagtttgtgctggcgtcacggctttccggtgcgggccatgtgcgggtgtttgtcgatcatctggcaggcgcggtgatcccttcgctgctggtgctggcaacgctggatatcggccatatgatgctgcacgtcgcggggatgtctttccttggcctcggtgtgaccgcgccgaccgccgaatggggcgtgatgattaacgacgcgcgccagtatatctggacccagccgctgcaaatgttctggccggggctggcgctgtttatcagcgtgatggcctttaacctggtgggtgacgcactgcgcgatcatctggatcctcatctggtgacggagcacgcacactaatgccgcaacagattgaactacgtaatatcgcgctacaggccgcgcagccgctggtacacggtgtatcgttaaccctgcaacgcgggcgcgtgctggcgttagtcggcggtagcggcagcgggaaatcattaacctgcgccgcgacgctgggcattttgcccgctggcgttcgccagacggcgggggaaattttagccgatggcaaagcggtttatccctgcgccctgcgcggcatcaaaattgccaccatcatgcagaacccgcgcagcgcctttaatccgctacacaccatgcacacccacgcgcgggaaacctgcctggcgttagggaaacccgccgatgacgctacgcttaccgctgccatagaagcggtggggctggaaaacgccgcgcgcgtgctgaagctgtacccgttcgagatgagcggcggcatgttgcagcgcatgatgattgcgatggcggtgctgtgtgaatcaccgtttatcatcgccgatgaaccgaccaccgacctcgacgtggtagcacaggcgcgcatcctcgatctgctggaaagcattatgcaaaaacaagcgccgggaatgctgctggtcacccatgatatgggcgttgtggcgcgtctggcggatgacgtggcggtgatgtcacaaggtaaaattgtcgaacagggcgatgtagaaacgctgtttaacgcccccaaacatgcggtaacgcgcagcctggtttccgctcatctcgccctctacggtatggagctggcatcatgactttacttaacgtctccggcctttcccatcactatgcccacggtggatttaacggaaaacatcaacatcaggcggtgctgaataacgtttccctgaccctgaaaagcggcgaaaccgtcgccctgctggggcgcagcggctgcgggaaaagtaccctcgcgcggttgctggtgggtttagaatcgcccgcgcaggggaatattagctggcgtggcgaaccgctggcgaaactcaatcgcgcccagcgtaaagcgttccgccgcgatattcagatggtatttcaggactccatcagcgccgtgaatccgcgcaaaaccgtgcgcgagatcctgcgtgaaccgatgcgccacctgctatcactgaaaaaatccgaacaactggcgcgcgccagcgaaatgctgaaggcggtcgatctcgatgacagcgttctcgacaaacgcccaccgcagttaagcggcggccagctccagcgcgtctgcctggctcgcgcgctggcggtcgaaccgaaactactgattctggatgaagccgtttctaaccttgatctcgtgttacaggcgggcgtcattcgcctgctgaaaaagctacaacaacagtttggcaccgcctgcctgttcatcacccacgacttacgcctggtggaacgcttctgtcagcgggtgatggtgatggacaacggacaaatcgtcgaaacccaggtggtgggagataaattaaccttttcctctgacgccggacgtgtgctacaaaacgcggtattacccgcattccccgtgcgccgtcgcaccacagaaaaggtttaacgcaaatgcaacgagtcaccatcacgcttgatgacgatttactggagacgctggacagcctgagccagcgtcgtggttataacaaccgttccgaagctatccgcgatattctgcgtagcgccctggcccaggaggccactcagcagcacggcacgcaaggtttcgcggtgctctcctatgtgtatgaacacgaaaaacgcgacttagccagccgcattgtctccacccagcaccatcaccacgatctctccgtcgccacgctgcatgtgcatatcaatcacgacgactgtctggaaatcgccgtgctgaaaggtgatatgggcgacgtgcagcattttgccgatgacgttatcgcccagcgcggcgtgcggcatgggcatttgcagtgcttgccgaaggaagattgagttatttctgaaacgaggaaagaaaagatattaactgaacttaatttataaaattaagttcagttgcatagatagatcctgtaaaggcagatattctgcgtaatgtacgccgctaaaatttataaatgattcaaacgctcattcagtgtttcaataatataggtattaacagagacttgttgctgcgcagccgcattattaaggcgttcactcagcgattctggatagcgtaacgtaaaggtcttaatcttttctgtacgcgcatacggctcaatacccgcagctttacaatcctcaagatactctcgcagggaaagttccccttctttttgcagcccctgaatgctgtcagagacaaaatcacaataacctgacaagcccaggaatttgccacgaaatgcattcagttctggcacgtaggtaataacagctggttgcccggcaatctccatagagtttggcgtcttcagtttgatcatggttttacccctatacttagtaaccagtcacgcacgctttctacagcgcctttatcggtatctggcgacggatgaggccgatggaaacacgcaacgctcatatttagtatgaacttacaacgcgaacctcttccttccttaatttctccgcctaatgctttaaccagtgactctatatcagaccacttgatcccttgaggaacaggagttttaaatatttgatccaatgtatttttttttcttccgtaaagcctgtaccttggttctcatggcatgtccttatgacttcactttatgacatcaatagtatgacatcacagtatgaagtcaagtttcccttccttacgccattgtcccaatcgtcttcctgaatcgcagcagcgcaatggtgaaaaacgcgccgccaattgccatcagcgtcaggaactgcggccagacgatttcgaatccggcaccccggtagagaatggcctgcgcgaggctaacaaagtgtgtcgtcggcatggtcagcataatgtcctgcaccatctgcggcatactttcgcgcggcgtggatccaccggaaagcatttgcagcggcagcagcaccagaatcaccagcagccccagttgcggcattgaacgcgctatcgtccccataaaaatgccgattgacgtggtggcaaacagactgagcgccacgcccagcataaacagcgggatcgagccttcaatcggtacgcccagtacacctttcgccatcagcaccagcgataatcccgataccaccagcaccaccagccccatcgaccagatcttcgccatcatgatctcaaacggcgttatcggcatcaccagtaagtgttccaccgtgccgtgttcacgctcgcggatcagcgccgatccggtcaatacaatcgccagcatggtaatgttgttgatgatcgccatcaccccgccaaaccacgcgggatcgaggttcgggttaaagcgcatccgggtttccagcgataccaacggttcgctgttatcacggtagcgcgcgacaaagctgttcacttcaccgttgataatattctggatatacccattgccggtaaatgcctggctcatgcgcgtggcatcgacgttcacctgaatatccggctggcgtccggcgaggacatcacgctgaaaattaggcggaatatttatcgcgaaggtatagcgtccggcgtccagtccggcatccatctcatcggcggtgatcatctccggtggcaaaaaccacggacgatagaagctgttaacgatccggttcgataactgcgattgatccatatcggcaatggcgatcggcgcgaggttcaacgatcctggcgtaacggtcgctgacgaatacaccgacaccgtaaacgagaagacaatcagcgtcagcatcgctttatcaccgagcagactgcgcaactctttgatacccagattaaaaatattgcgtaaatggcgcatcatccctcctgttttttcagcagcaggatgcttaagcccatcaccagcgggatggctatcagcaacgggataaaaagttgccacaaatcagtcagatccagcgctttcgagaacgttccgcgggcgatagtcagaaaatgactggtcgggtaaacctcgccgatccaacgtccaggcccttccagcgaagctaccggatcgatcatcccggaaaactgtgtcgccgggatcaacgtgataatcgccgttccgaaaatggcggcaatctggcttttcataaaggtggagatcagcagccccattccggtggcaatgatgatatacagcagcgccgccagggtgagcgtcaggaaactgcctttatgcggtacgccaaacacaaacaccgacaggccgcagagcaggaaaaagttcagcatccccagcgcgatgtacggcagctgtttgccaagcaaaaattcgctacgggtggtgggggtcacgtaaaggttgataatcgaccctagctctttttcccgcaccacgctaagggcgcttagcattgacgggatcatcatcagcagaagcgggatcaccgccggaacaatcgctggcaggctttttacgtccgggttatagcgatagcgcgtctcaatgttcatcagcccgctttggctggcgggtgtcgattgtcggctcgccacatcctgaagccaactctggtgcattgcctgcacgtaaccttttaccgtttcggcacgactgggcatcgctccgtcgatccagacgccgagttccacaggcgtaccacgcgcgatatcgcgcccgaaattgggcgggatctcaatcgccaccgtgatatcgcccgcacgcatccgacgatcaagctcgtcataactggtgagcggcggctgttcgataaagtaacgggaaccggagaggttgagtgtccacgcctggctactgacggtctggtcgcggtcgagcaccgcaaagcgcaggttttccacatccatactgatgccgtaacccattatcagcatcaggatcaccgttcccatcagcgccagcgtcgaacgtactggatcgcgtcgcagttccagcgcttcgcggcggctgtagctaaacagacggcgcaggctaaatccctgacgcggcgcgtgggtggtgtcgtgtaccacgggcggcgcttcggcttcgttgctctgccctgccgcttcctgcaaataggcgataaatgcctcttccagactggcggctccgcgtttctcaaccagttcctgcggtgtaccgctggcaagcacttttccggcgtgcatcagtgagatgcggtcgcaacgttccgcttcgttcataaagtgggtagagatgaagatagtcactttgtcctggcgcgagagatcgaccatcaactgccagaacatatccctcgccaccggatcgacaccagaagtaggctcatcgaggattaacatctccgggcgatgaatcaccgccaccgccagcgaaagccgctggcgaatgccgagcggcaatgactccggcagaacatcttcaacgtcgttgagcttaaaacgctcgctcatttcagccactcttgcgggaatttccgcttccgggatgtgaaacaaacgggcatgtaactcaaggttttgccgcacggtgagttcgttatagagcgaaaacgcctgcgacatatagcccacccgacggcgggtatcgatatcttttggatcaaccggttgcccgaacagccacgcctcaccttcgctggcgggcagcagtccggtgagcattttcatggtggtggatttaccgcagccgttcgaaccaagaaaaccaaaaatctccccgcgtggaatgcggaaattaacgtgatcaacggcaacgaaggaaccaaaacgcatggtcagatcgcgcgcttcgatggcaatctctgcgttttcaggttgatacggtgggatcactaccgcctgatgcgcctggcgttgcgcttgcggtaacagatttataaatgcttcttccagcgtagcgctttgcgtttgctgccgtagctcttcggcgctgccagttgccagcacttctccggcattcatcgctaccagccagtcgaagcgttcggcctcttccatataggcggtggcgaccagcacgctcatattgctctgccgctggcgaatactgtcgatcagatcccagaactgggagcgggagagcgggtcaacccccgttgttggctcatcaaggatcaacagttccgggtcgtggattaacgcgcagcacagcccaagtttttgcttcatcccgccggagagtttccctgccggacgatcgcgaaacggtgctaaccccgtgctggtcagcagctcattaattcgcacttcccgctccgctttgtcgtgaccgaacaggcgagcgaaaaaatcgacgttttcatacaccgacaaggtgtggtagaggtttttgcccagcccctgcggcatccaggcgatgcgcgggcagacgtcgcggcgatgcctcgggtcgcgcatatcgccgcccagcaccatcacattgccctgctcaatgacgcgggcaccggaaatcaacgacaataagctcgacttcccgacgccatccggaccaatcagcccgaccatacagcgggccggaatatcgagagtaatattgttcagcgcaacgttttttccataatgctggctcacgcccgccagttgcgcgacaggcgggacgggaaccagttccagatgcgtcattgcggcaacctcaccacgaggtcgtcaggccacggaagttcttcattcacccgcacccacgctacgcccggtaaaccggttttgacatattccagatgctgctggagtaattccggtgggatacgcgctttgacgcggaacatcagtttcagccgttcatcgctggtttcgacggtttttggcgtgaactgggcgacactggcgacaaaactgatggtcgccggaatacgcagatctggcgcggcatcgaggatcagccgggcttcaccgccaagtttcagcgtgcccgcctgttcggttggcaggaagaaagtcatatagacgtcgctgagatcgaccatattcagcacccgaccgcctgccgccagcacttcccctggctcagcaacccgatactgcacgcgtccgtcacgcggggctttcagttcactgtcatcgatatctgcggcaatacgccgttcagtggcttgcgcggcttcgacgcgagtttgggcctgaatgatattggtacgggccgcttctatagccgctttagaagccgatacctgagcttttgccgattccagcgcagctcgggcgctctcagcggcggcgcgatcgtcatccagctgttgcgcagaaatagcccctcgttgggcgagcgagcgggaacgcgtatgacgtttagccacggagtccagttcggactggcgttgattaaccagcgactgcgcggcacgagtttcgctttgccgttgctccagcaaagcctgcgcggcagcaacggcactttgtgcttctttgatttgcgcgatggcttccagtcgctgctcctgcaacacgcgagtatccatcttcgccagcacttcgccttcgcgaacaaactggccttctttcaccagaatggtgtcgatacgcccggcaattttgctggcgatatccacttccgtcgcttcaatgcgcccattgctgacagcaaagccttccggcacacccgccgggcgcaacagccaccacgccacgacggcagccaccaccagtaacccgacaacccaccacgccagatggcgcttactcttatccataatcgacccgccataatccctgcaagcaaacgacgcgtgttacaactgccgccgaacgacgttcagcggattcttccatccgggataagaaggaaacgacaaatacgaccagcgcgcagagcattgagcgccaacggggaaggcttagtgaaaacgggtagtaatgttgtcatcatcagcattcctggccgtaaatgaaacacgcatactcataagtgtgatctataaaactggctgacaaaacggtatccatcctgttggatagcgtttcacgcctgttcagttgcaggaacagagcattcctttttacgttttatcaacagtctcaaccagatagtaacattaatattcatgttgtctatggttcagagctgtaacattgtgcgccttctgatcaaaggcataagtccatttctgtttttttcatgctggtaagacttccagggagtggttatctcaggccctgcaccagggttaatttggcaattatgcatgctgaacattcttccagcatgtttactgtcacgggcgttaagacctaaaactgtccccgtttcacctatacattctcttccaccattaccgttatgtgcaacaacttgatttatacctaacatttgtgagcatgctaatagtgcttcaagtttaggtctgtaatctgtcgaaacagaaaaataacgattaaaggatcgacaagagatagcccggctatttttaaactttttgccattaattacagcatggtgctttttattgataattgccgctaattcgaccggatcgagagcattggtcatttcatcactagagactgttatcggtcctataatgtaacgttttcgctgatcatcaaaagttatcccatgatgatttgccattattttgtatttggggtcatagaaacatacaggataatcttttatcccagagtaggtatcctcatcaagtggtttcatgcgcgtgaagttctgcatatagttaccattgcaattcgtttcatgatttccagctaatacatgaacgttttcattgatactcattatgcgttttaataaatcgatgataaatttatcgccacagatattactaaatcgatcgccagtctggtcgcccagaaacgtacatggcgtgactgcgtctttattaataaccaaataaggctgaagactttctaaaacaatgtctcttctgttcaggatactgattattatattaacattagtgtcaagttgctcattaaagttctcccttagcaatacgttgagaacttcatcttctatattaagcaactggctaaggaaattttctccttcagccatgattcccaaatgtcccgttgcaaaaagcgcgtacaaaactgcaccgactgagccatcggtatcgccaaaataggtcggtctggtacttgtgggatcaacaggtgaacaattggagaaataggttctgtcagcgaactggggttttatcattgtttcgaatttaatatcaaatacattgtattgcgatattttccagttccagatgggtttgtacgactcagtaactgcaacatcattagcattatcatttactgtcatattattaagtaaataaacaatgctgcaccaattaatatcggtattatcaagagggcaaccgtaatttttactattaattgtcacaataaactgataacagttattcctacgtagaatatgagcgcgcatgcccgatagcatactatatttttctgaatgattcgtttgtatggtaaatgaaattttgtcatcttgaatagattgttggaaccgttctatttgccaatcatctattttttccacaacctcaccgagcattgtcctggcaatacttgatatatcatcacctataccatttgcaatatacccaaacagttctttagtgaagttggtaacatgctcttgcaccatatcatttgttgtgattgtcgttgtactgtcgttagtgcctgccacagttccaattttcatcttttacctcatattatttaccgcgaggaatacatagttaacatttaatcttatgacatacacctcatgttcgatgggaaaataattatattttgcacaaatcattcagccttaaagcataatatgaaatttcttatctcatagcagagaaagtccctaaagattgtagaggcgtcatcagaacatgcctctacaatcgattaagaaaacctatgaaatactggcaaaattaaaaagagataccacagcactcatgaagttttattgaggttgaaaacaactaagccctgggacaccttttttatcaccacgttcgttaggtgctatcttccaggaatttagccccatggtataattatcaattttttgatgctgatctacccctaatccataatggccatatttctgtttagtttttttgagcgtctgtccacatttgaagatatcttcaggttttggtctgaaagcagtagtgttattaaaataattttcatatacaggtgtggatgctacagcattgcttctaattagatggataagacgatcatccatgtgttgtttatgttttttattaaatatatttgctaattcctcaggatcaattgggtctttcatctgattaaatggaacctgcaaagcaccgagacaataacattcattttcttcatttcttattattccgtgatgactggttaaaactttcgtttctgagtcataatgacaaacatcgagcgttttaattaagttatacgtatcaccggcagagagtttataattttctagtcgtgcagtatagttaccattaaaattgatttcatgatttccagccagaacgatgacatttttattaatacggctatctttattaccatccatatttcgcatagaatttagcaaagtaaggatatatttatcaccaaaaatagtactaaatctatcgcctgtatgatccccaaggaagatacaaggggttatcgcatcgtcctttaaaaaaacatgttgatgcaactcattcaatatcatgtctctcgtatttaataaattgtagagcaatttattatttttatgtatgtatgcagatgaagccatgttttcgtgttttaataattcacataataaactccaacccttttccctgatgcctatatgccctgaaacgagcaatgcataaagtacagcgcctactcttccatctgtatcgccaaaataagccgtgttggcattttgtgggttaatcacaccacattgtttataaaagtctattttagaaaacacagatttaacatagctatcaaacttatccttaggaaacgtctctttagagacatcccaacgccagtcagctttaaaattaccgctaagaagagtaaagaaattttcaggtatgatagaaagcccattaactttataagttatgtctgatttataaattatgtctgatttatctccggagaaattaataaaataataaccatccttacactcaatcttaactgtaatgggagacgataattttatcacatggttattgtctggtataattgtaaagataaacgtgttagtagtattatcggcgaaactattatattcttgaatatctatagatggctcactattgtaaaaccatattttctccatctgaagactatgttcatttaccctccagtgaccatgttgcaggaaatagatgatattcaggcctaaatcgttatctatttgcgaaaagtcattcagcatattaacttcaactgtgtttgatcgatattttttatcaaccttgccatggtgttgatgactgttaactttatctgaatgcttatcttgatggtttgaagagaagtgcttaaatatattgtgaaatactttcataaataacctgtaatatttttacttgttagtaacaaaataaacaatacatgtctgaaagacatatttacgatgatacaaagcaataatacttatatgttcgatgattttaagcaccgagactatccggtcttttactaaataatggaaaacaatccatccctggaagataattgtaaaaaaaacaacagaataagaattaatcttaggataaatatttatttatcatggccttttaaccggtaaaaaatggcactcggcacagtaaaccccgctatagttatgctatgcatttgtctttaatgatatctcgtcgttatattaacaggctgaaattatcattaatgcacatttcattattagcagggatacctgaggagtttaaagtgaacatatatatcgggtggcttttcaaattaatccctttgattatgggattaatttgcatcgcgttaggtggctttgtgctggaaagttcagggcaaagcgagtatttcgtcgcgggtcatgtgctgatttctctggcggccatatgcctggcattattcactaccgcatttattatcatttcgcagctcacgcgcggcgttaatacgttttacaatacattgttccccattattggctatgcggggtcaattatcaccatgatatggggttgggcactgttagcaggcaatgatgtgatggcagacgagtttgtcgccggccatgttattttcggcgttggtatgattgccgcctgtgtatcgacggtggcagcgtcatccggtcactttctgctcattcccaaaaatgcagcggggagcaagagcgatggaacgccggtacaggcttattcttcattaatcggtaattgcctcattgccgttcccgttttactcaccctgctcggtttcatttggtctattacgctgttacgtagtgctgacataactccgcattatgtcgcgggtcacgtattgcttgggttaaccgcaatctgtgcctgtctaattggccttgttgccacaattgtccatcaaacacgtaatacgttttcaactaaagaacactggctgtggtgttattgggttatttttctcggctcaatcacggtactgcaggggatatacgtcttagtcagttccgatgcaagcgcccgactggctcccggcattattcttatttgcctcggaatgatctgttacagcatattctcaaaagtctggctactggcactggtctggagacgtacctgttcgttagccaacagaataccgatgatacccgtcttcacctgcctgttttgccttttcctggcatcatttcttgcggaaatggcgcagaccgacatgggatattttattccttcgcgagttctggtcggtttgggagcggtatgctttacgttgttctcaatcgtttcaatattagaagcgggttctgctaaaaaataattgcaacgtaccggataaaaccagcgttgaccatttgcgtaacgctggtttttcttaggcatcatgaaataacgcagcattaatgcatagtggttaaggataaaaaaacaacaaagttactgtctttttcagcctgttcatattttataaagatctggccactgggtgagttttcaatcacctttccttccaccttatattaagcctggagggtttcagttcacgggctcattagaaaataatcacaagatagccactatcaaaattagctcatttttaatgcggctctaataattttcatctttaggtaacaggtcaggacgacttcgctgcaatcaaatcctgcgcacaagcccacgcactcgaccacgcccactggaagttatagccccccagccagccggtaacgtccatcacttcgccgatgaagtacagcccaggcactttgcgcgcttccatcgtccgtgaagagagttcgttggtgtccacgccgccgagcgtcacttcggcagtgcgatagccttcagtgccgttgggttgtacgcgccagtcggtcaatgtgctaatcagtgcctgttggtcacgcacgttgagctgttttagcgaaacattcgggatttgcccgagttgctgtaagcgttcaaccaaccgcttcggtagatgaaccgccagtgtgtttttcaggctctgattcggatgtgcgttacgctgctcattcaggaaggtttcgagatccacatccggtagcagattgatactgacaaattcacccggttgccagtagctggaaatctgcaacaccgccggtccagacaagccgcgatgggtgaagagtaagttctcacggaaaacgatgccgttttcagcggtaatcacggaaggcaccgccacgcccgccagcacctgtaactcttcgagcaacggtttatgcagagtgaatggcaccagacccgcacgggtcggcagcacgttgaggccaaattgttcggcaatcttataaccaaacggcgacgcgcccagccccggcattgacagcccaccggtcgccatgaccagcttttcgcaaccgacagtcatgccgttcagatcaagcgtgaagcctgtttcatcctccgccacactcagcacttcgctacgcaatctgaaggtcacattgcccttctcgcactcatccaccagcatgtcgacaatctgctgcgcggagtcatcgcagaagagttgccctaacgttttctcgtgccatgcgatgccgtgtttattgaccagatcaatgaaatcccactgggtaaaacgtgcgagtgcagacttacaaaaatgcggattctggctcagataagcgcctggttcgacataaaggttggtaaagttgcagcgcccaccgccagacataaggattttgcgccctggttttttaccattatcgatcagcagaacccggcgtcctgcctgacctgccagcgcagaacagaacatacccgccgcaccagcgcctataataatggcatcaaacctttccacgttgcgctcctcttagaaaaaacgggcgtgaattgtaaagattcctcagtggtcgcaccagcatcaatattactaaaaggaagtatttgcctgaattatataagataattattttttgagtgaaatccatacaggaggcaaatcaaaaaaagtctatatttcactttgcccgcgccgcgaaagtcactgataatgcgccgcgttcatgtcctcaaaatggcgtaacgtcctatgctacatttgtttgctggcctggatttgcataccgggctgttattattgcttgcactggcttttgtgctgttctacgaagccatcaatggtttccatgacacagccaacgccgtggcaaccgttatctatacccgcgcgatgcgttctcagctcgccgtggttatggcggcggtgttcaactttttgggtgttttgctgggtggtctgagtgttgcctatgccattgtgcatatgctgccgacggatctgctgcttaatatgggatcgtctcatggccttgccatggtgttctctatgttgctggcggcgattatctggaacctgggtacctggtactttggtttacctgcatccagctctcatacgctgattggcgcgatcatcgggattggtttaaccaatgcgttgatgaccgggacgtcagtggtggatgcactcaatatcccgaaagtattaagtattttcggttctctgatcgtttcccctattgtcggcctggtgtttgctggcggtctgattttcttgctgcgtcgctactggagcggcaccaagaaacgcgcccgtatccacctgaccccagcggagcgtgaaaagaaagacggcaagaaaaagccgccgttctggacacgtatcgcgctgatcctttccgctatcggcgtggcgttttcgcacggcgcgaacgatggtcagaaaggcattggtctggttatgttggtattgattggcgtcgcgccagcaggcttcgtggtgaacatgaatgccactggctacgaaatcacccgtacccgtgatgccatcaacaacgtcgaagcttactttgagcagcatcctgcgctgctcaaacaggctaccggtgctgatcagttagtaccggctccggaagctggcgcaacgcaacctgcggagttccactgccatccgtcgaataccattaacgcgctcaaccgcctgaaaggtatgttgaccaccgatgtggaaagctacgacaagctgtcgcttgatcaacgtagccagatgcgccgcattatgctgtgcgtttctgacactatcgacaaagtggtgaagatgcctggcgtgagtgctgacgatcagcgcctgttgaagaaactgaagtccgacatgcttagcaccatcgagtatgcaccggtgtggatcatcatggcggtcgcgctggcgttaggtatcggtacgatgattggctggcgccgtgtggcaacgactatcggtgagaaaatcggtaagaaaggcatgacctacgctcaggggatgtctgcccagatgacggcggcagtgtctatcggcctggcgagttataccgggatgccggtttccactactcacgtactctcctcttctgtcgcggggacgatggtggtagatggcggcggcttacagcgtaaaaccgtaaccagtattctgatggcctgggtgtttacccttccggctgcggtactgctttccggcgggctgtactggctctccttgcagttcctgtaatcgtacgcaccaaaacgagcgggtcagctggcccgcttcagattgtgacatagtgcgctttgttcatgccggatgcggcgtgaacgccttatccggcctacaaaaacatgcaaattcaatagattgcagagattatgtaggcctgataagcgtagcgcatcaggcaattttgcgtttgtaatcagtctcgagcgggtcagtttactggcccgctttttttatgcgttattattgctgaagtgcttaatgccaaatcatcaatgcaatcaggctgaccaccaccagaccacacaatgcgctggtcagaataaactgccgacgcacccgctcacagcggcgaataaattcatcatcgtgatgatcgcgataacgttgggcatagatataccaaacgagacgcacctgtttgttgggttggccatgtgaggtaaaaaagccccctccatcaacatattgatagagcaatggatcgcagttacgcagtaccactaacaacgcgcgtagtgatgagaaatagcgcgccatgttaacaatgcaaacgacacataaagcccaaaataatgcgacggtgcttatcatacctcctccccggcgacctgcccgcggagttccaccccggggctaccgctcccgatacgctgccaatcagttaacaccaggtcctggagaaaccgcttttgtggtgaccaacatccgagcggctctatagatagtgtaggagatcaggttgttttttttccagaaggttaaccactatcaatatattcatgtcgaaaatttgtttatctaacgggtaagcaaggcggattgacggatcatccgggtcgctataaggtaaggatggtcttaacactgaatctttacggctgggttagccccgcgcacgtagttcgcaggacgcgggtgacgtaacggcacaagaaacgctagctggccagtcatcgacaactttatggaaggagtaacactatggcttataaacacattctcatcgcggtcgatctctccccggaaagcaaagttctggtagagaaagcagtctctatggctcgcccctacaatgcgaaagtttctctgatccacgtagatgtaaactactctgacctatacaccgggcttattgatgtgaatctgggtgatatgcagaaacgcatctctgaagagacacatcatgcgctgaccgagctttccactaatgcaggctacccaatcactgaaaccctgagcggcagcggcgacctgggccaggttctggtcgatgcaatcaagaaatacgatatggatctggtggtttgtggtcaccaccaggacttctggagcaaactaatgtcttccgcacgtcagctgatcaacaccgttcacgttgatatgctgattgttccgctgcgcgacgaagaagaataatcatccccccacgacgtgttcctgaacgcccgcatatgcgggcgttttgctttttggcgcgccttgttacctgatgcagcgtaaaccccttatctggcctacgatctgcgtacgcaatcaaaatctcctgccaatacaacatttaacactatcatattttccatcattagtgtgatcagctggttattttctgttgtaatagtgtattaatctattcaccgcatcaatattaagaatctctgacagatgtaaactttttcgcgcgttatcccttacgcgttcatacttttcaggatggtattggaaggttaataaatatgaatacaacaacacccatggggatgctgcagcaacctcgcccatttttcatgatcttttttgtcgagttatgggagcgattcggctactacggcgtgcagggcgtactggcggttttcttcgttaaacagcttggattctcgcaagagcaggcttttgtcacttttggtgcttttgctgcgctggtctatggcctcatttccattggcggctatgtcggcgaccacctgctggggaccaaacgcaccattgttctcggagcacttgtgctggcgattggctacttcatgaccggcatgtcgctacttaagcctgacctgattttcatcgccctggggactatcgctgtcggtaacggcctgtttaaagctaacccagccagcttgctttcgaagtgctatccgccgaaagatccgcggcttgatggcgcattcaccctgttctatatgtcgatcaatatcggctcgttgatagcgttatcgctggcccctgtgatcgctgatagatacggttattcagtcacctacaacctgtgcggggcggggttaattatcgcattactggtttacatcgcctgtcgtggaatggtgaaagacattggttctgaacccgacttcaagccgatgagcttcagcaaactgttgtacgtattacttggcagcgtggtgatgatcttcgtatgtgcatggctgatgcacaacgtagaagtcgccaatctggtgctgattgttctctccatcgtcgtcaccatcatcttctttcgtcaggcattcaagctggataaaaccgggcgcaataaaatgtttgtcgcctttgtcctgatgctcgaagcggtggtgttttacattctctacgcccagatgccaacgtcgctgaacttctttgccatcaacaacgtgcatcatgaaattctcggcttttccataaacccggtcagcttccaggcgcttaacccgttctgggtggtactcgccagcccaatactggcaggcatttacacgcatctgggtaacaaaggcaaagacctctcgatgccgatgaaatttactctcggcatgtttatgtgctcactgggctttttgacggcggcagctgcgggaatgtggtttgcggatgcacaagggctgacatcgccatggtttatcgtgctggtgtatttattccagagcctgggtgaattgtttattagcgcccttggcctggcgatgattgctgccctggtgccgcagcatttgatgggctttattctcgggatgtggttcctgacgcaggctgccgcattcttgctgggcggctatgtggcaacatttaccgcagtgccggacaacattaccgatccgcttgagacgttacccgtctataccaacgtgtttggtaagattggcctggttacgctgggcgttgcagtagtgatgctgttgatggtgccgtggctgaaacgcatgattgcgacgccggaaagccattaattattcttgcagaaagcagggtagcgttatcgctaccctgctttacttttacacgggcgtacctgcatagatatcaaagcgatgccctttagtcacaaccgcgtttggcgtggcgacattcgctagcggtggcgcgtagtccgggcgctttactaccacgcgtttggtcgccagcaagcgtgcaggctccagcaatccatcggcatcaagatccggccccaccagcgactgaaagacacgcatctcttttttcaccagcgcgcttttctgcttatgcgggaacatcgggtcgagatagaccacctgcgggcgtggggtaatatcggttagcgccgtcaggctggaggcgtgaattaactgcaaacgctcctgcaaccagccgccgatttccgcatccgcataaccacgcgccaggccgtcgtcgagcagcgcggcaacaactggattacgctccagcatccgcacgcggcaaccgactgaagccagcacaaaggcatcgcgccccagtcctgcagtggcatccaccacatccggcaaataatcgcctttaatgcccaccgctttcgccaccgcctcaccgcgaccaccgccgaatttgcgtcggtgcgccatcgctccgccaacaaaatcaacaaagatgccgccaagttttggctcatcacgcttgcgcaattccagatgttccggcgttaacaccagcgccatcaggttgtcttcatcgtgctccagcccccagcgggccgccagaacagataaggcgccgtctccggcgcctgtttcatcaattaagcagattttcactgaatgatcagcccttaatgccgtaatgctccagcatcgcatccagctgcggttcacgaccacggaagcgtttgaacagatccatcggctcttctgaaccgccacggctcagaatgttgtcgaggaacgactgcccggtttcacggttgaaaatgccctcttcctcaaagcgcgagaaagcatctgccgccagtacgtcagcccacaggtagctgtagtaacctgccgcataaccaccggcgaaaatatggctgaaagcgtgcgggaaacggccccaggacggagatggcaccacggcaaccagtttcttgatttctgccagagtttcgaggatttttgccccctgatccgggcggaactcggcatgaaggcggaaatcaaacaggccgaactccagctgacgcagaataaacagcgccgcctggtagttcttcgccgccagcattttatccagcaactctttcggcagcggttcgccggtttcatagtgaccagagataaacgccagcgcctccggctcccagcaccagttttccataaactgactcggcagttcgaccgcatcccacggcacaccgctgataccggaaacaccagcggtttcgatgcgggtcagcatatggtgcaggccgtgaccgaactcgtggaacagggtgatcacttcgtcgtgagtgaacagcgccggtttaccatttaccgggcggttgaagttacaagtcaaatacgcgaccggtttttgcagagaaccatcagctttacgcatctggcctacgcagtcatccatccacgccccgccgcgcttgttttcacgggcatacagatcgaggtagaagctgccgcgcagttcgttattttcgtcatacagttcgaagaaacgtacatccggatgccagacatcaacctctttacgctctttagcggtgatgccgtaaatacgtttcaccacttcaaacaggccgttaaccgctttgttttccgggaagtacggacgcagctgctcgtcgctgatgctgtagaggtgctgtttctgtttttcgctgtagtaagcgatatcccacggctgcaactcatcgacaccaaattcggctttagcgaaggcacgcagttgctccagctctttttcgccttgcggacgcgcgcgttttgccagatcggttaagaaatccagcacctgctgcgggttttctgccattttagtggcaagggatttaaaggcgtagttttcaaagcccagcagttgcgccagttcgtgacgcagcgcgaggatctcttccatcaccttgctgttatcccacttaccggcgttcgggccttgatcggaggcgcgggtgctgtaagcgcgatacatctcttcgcgcagagcctggttgtcgcagtaggtcattaccggcaggtagcttgggatatccagcgtcagcaggtagccttccagctctttcgcttcggcctgggcttttgccgcagccagcgcgctttctggcatccccgccagccccgcttcgtcggtaacgagtttggtccagcccatcgtcgcatcgaggacgttgttgctgtactggttgcccagttcagaaagacgggtagcaatttcgccgtaacgctgctgtttctctttcggcagacctatgccagagagttcaaaatcacgcagggcgttatcaaccgctttcttctgcgccgtgttcagcgtggcgtaatgatcgccatcgcgcaggtcgcggtacgctttatacagcccttcatgttgccctacccaggtgctgtattccgacagcagcggcagggtttgctcgtaggcttcacgcagttccgggctatttttcaccgagttcaggtggctgaccggggagaagatacgccccaacacatcgtccacttccgccaacggctggcagagattttcccaggtgtacggtgccccttgcgctactacgcgcgccacattttcgcggcaatcgttcagcgcctgagtcacggctggaacgacatgttccgggagaattttagaaaacggaggcaattcaaagggagtcagtaacggattcgtcattcgcgcagtcctggttaaagaggttaaggaagcgctcaacaggcgctttacataatgtgtgtagcatggggttaagtgtagtgaatttcaatgagaaacgttacgctttcgcggcggcggcctcttttcggtatactgtcctgatacgcttttgtgcgccccgaatacgggccgatttttacttaccggaacacctttacccatgctcagttatcgccacagctttcacgctggcaaccacgccgacgtccttaaacataccgttcagagcctgatcatcgagtcgctgaaagagaaagataaaccgtttctctatctcgatacccacgcaggggccgggcgttatcagttaggcagcgaacatgccgagcgtaccggcgaatatctcgaaggtatcgcccgtatctggcagcaggacgatttgcccgcagaactggaggcgtacatcaatgtggtaaaacacttcaaccgtagcggtcagttgcgttactaccccgggtcgccgttgattgctcgccagctactgcgcgaacaagacagcctgcaactgaccgaactgcacccgagcgattacccgttgctgcgttctgaatttcagaaagacagccgtgcgcgcgtcgaaaaagccgacggtttccagcagcttaaggccaaacttccgccggtttcccgccgtggtttaatccttatcgacccgccgtatgaaatgaaaaccgactatcaggcggtggtcagcgggatagcagaaggttacaaacgtttcgccactggtacttacgcactgtggtatccggtggtgctgcgtcagcaaattaagcgcatgatccacgatctggaagcgaccggtattcgcaaaattctgcaaattgaactggcggtactgccagacagcgatcgccgtggcatgaccgcttccggcatgattgtgattaacccgccgtggaaactggaacagcagatgaataacgtgctgccgtggctgcacagcaaactggttccggcaggcaccgggcacgccaccgtaagctggatcgtgccggagtaattgcagccattgctggcacctattacgtctcgcgctacaatcgcggtaatcaacgataaggacactctgtcatgactaaacactatgattacatcgccatcggcggcggcagcggcggtatcgcctccatcaaccgcgcggctatgtacggccagaaatgcgcactgattgaagccaaagagctgggcggcacctgcgtgaacgtcggctgcgtgccgaaaaaagtgatgtggcacgcggcgcaaatccgtgaagcgatccatatgtacggccctgattatggtttcgataccaccatcaacaagttcaactgggaaacgttgatcgccagccgtaccgcctatatcgaccgtattcatacttcctatgaaaacgtgctcggtaaaaataacgttgatgtaatcaaaggctttgcccgcttcgttgatgccaaaacgctggaggtaaacggcgaaaccatcacggccgatcatattctgatcgccacaggcggtcgtccgagccacccggatattccgggcgtggaatacggtattgattctgatggcttcttcgcccttcctgctttgccagagcgcgtggcggttgttggcgcgggttacatcgccgttgagctggcgggcgtgattaacggcctcggcgcgaaaacgcatctgtttgtgcgtaaacatgcgccgctgcgcagcttcgacccgatgatttccgaaacgctggtcgaagtgatgaacgccgaaggcccgcagctgcacaccaacgccatcccgaaagcggtagtgaaaaatgccgatggtagcctgacgctggagctggaagatggtcgcagtgaaacggtggattgcctgatttgggcgattggtcgcgagcctgccaatgacaacatcaacctagaagccgctggcgttaaaactaacgaaaaaggctatatcgtcgtcgataaatatcaaaacaccaatattgaaggtatttacgcggtgggcgataacacgggtgcagtggaactgacaccggtagcagttgcagcgggtcgccgtctctctgaacgcctgtttaataacaagccggatgagcatctggattacagcaacattccgaccgtggtcttcagccatccgccgattggtactgttggtttaacggaaccgcaggcgcgcgagcagtacggcgacgatcaggtgaaagtgtataaatcctctttcaccgcgatgtataccgccgtcaccactcaccgccagccgtgccgcatgaagctggtgtgcgttgggccagaagagaagattgtcggtattcacggcattggctttggtatggacgaaatgttgcagggcttcgcggtggcgctgaagatgggcgcaaccaaaaaagacttcgacaataccgtcgccattcacccaacggcggcagaagagttcgtgaccatgcgctaaatgttaaagggctaagagtagtgtgctcttagcccttaattacgtttccgctatcagttcagaagctgaagcagaaagcggatcagttccagcagcgcaattaacgctccaagaacgatgattgctttatcaatcacccgttttctccatgcgatggagtgagaatgcatccgcttactcatccactgcctgtcacggcgcatgtctcattgttagatgacgactatctcactccggccagagcatcagttaacggcaccacccgtacttctgaccaggactttgaaagcgtttatgcgcattaccagagtgaaaatgcctcagagctaactggataatcatacagtacattcaggttataaaaccagcatgtccttgcaatagtttcagtatggtattagcattgatgcgttagatgatgactatctcactccagccagagccaccaactcagggctgaagagtaaaaaaaccgacgcaaagtcggtttttttacatccggattcggacaaggcttaatatgacgatgacccagtgaaagtatataaatcgtcattgcgatatataccgaagtgccccctccgccagctgaagaaatcgctaattcttgcaatgttagccactggctaatagtattgaaccgttagatgtgggcattctcactccagccagagccaccaactcaggctgaagagtaaaaaaccgacgcaaagtcggtttttttacgtcctgattcaaaccgcctttcaaatgaatagccaactcaaaattcacacctattaccttcctctgcacttacacattcgttaagtcatatatgtttttgacttatccgcttcgaagagagacactacctgccacaatcaggagcgcaatatgtcatttctgttacccatccaattgttcaaaattcttgctgatgaaacccgtctgggcatcgttttactgctcagcgagctgggagagttatgcgtctgcgatctttgtactgccctcgatcagtcgcagcccaagatctcccgccacctggcattgcttcgtgaaagcgggctattgctggaccgcaagcaaggtaagtgggttcattaccgcttatcaccgcatattccagcatgggcggcgaaaattattgatgaggcctggcgatgtgaacaggaaaaggttcaggcgattgtccgcaacctggctcgacaaaactgttccggggacagtaagaacatttgcagttaaaaatttagctaaacacatatgaattttcagatgtgttttatccgggaggcattatgttactggcaggcgctatctttgtcctgaccatcgtattggttatctggcagccgaaaggtttaggcatcggctggagtgcaacgctcggcgcagtactggcgttagttacgggcgtggttcatccgggtgatattccggtggtgtggaatatcgtctggaacgcgacggctgcgtttatcgccgtcattatcatcagcctgctgctggatgagtccggcttttttgaatgggcggcgctgcacgtctcacgctggggtaatggtcgtggtcgcttgctgtttacctggattgtcctgctcggtgctgccgttgccgccctgtttgccaatgatggcgcggcgcttattttgacgccgattgtcatcgccatgctgctggctttaggattcagtaaaggcacgacgctggcgttcgtgatggcggccggattcattgccgataccgccagcctgccgcttattgtctccaacctggtgaatatcgtttccgctgatttctttggcctcggctttcgcgaatacgcctcggtgatggtgccggtggatatcgccgcgattgttgccacgctggtgatgctacatctctattttcgcaaagatattccgcagaactacgatatggcgctgctgaaatctcccgcagaagcgatcaaagatcctgctacgttcaaaactggctgggttgttttactgcttctgctggtgggatttttcgtcctggaaccgctcggcattccggtgagcgccattgcagctgtgggcgcgctgatattatttgtcgtcgctaaacgcggtcatgcgattaatacgggtaaagtcctgcgcggtgccccctggcagattgtcatcttctcgctcggcatgtatctggtggtttatggcctgcgcaatgccggattaacggaatatctttctggcgtactcaacgtgctggcggataacggcctgtgggccgcgacgctcggcaccggattcctcaccgccttcctctcttctattatgaacaatatgccgacggtactggttggcgcgttgtccattgatggcagcacggcatctggcgttatcaaagaagcgatggtttatgccaatgtgattggctgcgatttgggaccgaaaattaccccaattggtagcctggctacgctactctggctgcacgtactttcgcagaagaatatgactatcagctggggatattacttccgtacagggattatcatgaccctgcctgtgctgtttgtgacgctggctgcgctggcgctacgtctctctttcactttgtaatgagatactgatatgagcaacattaccatttatcacaacccggcctgcggcacgtcgcgtaatacgctggagatgatccgcaacagcggcacagaaccgaccattatccattatctggaaactccgccaacgcgcgatgaactggtcaaactcattgccgatatggggatttccgtacgcgcgctgctgcgtaaaaacgtcgaaccgtatgaggagctgggccttgcggaagataaatttactgacgatcggttaatcgactttatgcttcagcacccgattctgattaatcgcccgattgtggtgacgccgctgggaactcgcctgtgccgcccttcagaagtggtgctggaaattctgccagatgcgcaaaaaggcgcattctccaaggaagatggcgagaaagtggttgatgaagcgggtaagcgcctgaaataaagcggcgatatccactgccgatagttggtaaagtgcgctttgtttatgtcggatgcgacgctaacgcgtcttatccgacctacaaaaccgtgcaaattcaatatatggcatgaaatatgtagagcgtagcgcatcaggcaattttgctatttacgcagcactcctcgcgtaagaattcaattatcgcttccagcattgcgtattgcgaaacacacatcagcgtccgactctcacggttttgtttgaccagtcctaccgataccagtgctgatatatggtggctgagtgtggagccaggtatcccaagctgcttttgcaactcaccgaccggcaacccttgttccccggctttgacaagatgtttaaatatgaacaaacgggtcgggtgacctagctctttcagcgctttagcgacttcttccaactgcatatgacacccctctgtctggttgatatttcgataataccagaaatatcttgatctgaatttcatttcgattattctggaaatatagatttatccaatgaggttacgtatgagtagttggcttgcgatgctgcaagatgccgcagagatgtttgtgtttctcgccgtcgagctttcgttgctgtttatagtgattagtgccggtgtcagcctgataagacaaaaggtgccagaccataaaatccagcagatgatgggggccagaaaagggagaggctatctcctggctgctctgttgggagccgttaccccgttctgtagttgctcgacaatacccatgttacgtggattgttgtcagcgaaagccgggttttgtcagcgccagtgatataagacggtaattcgccatttggattgtccgctccacccaacatgttgtttccttaaggttctcacaccagaaaggacatcaacatgctgagcagagaggacttttacatgataaagcaaatgcgccagcagggcgcgtacatcgtcgatattgcgactcagattggttgctctgaacggacggtcagacgctacctcaaataccctgaaccgccagccagaaagacccgccacaaaatggttaagctgaaaccgtttatggattacatcgacatgcgcctggcagagaatgtctggaatagcgaggttatcttcgcggagattaaggcaatgggttatacgggcggacgttccatgctgcgttactacatccagcccaaacgtaaaatgcgtccgtcaaaaagaacagttcgcttcgaaactcagcctggataccagctccagcatgactggggcgaagttgaggtggaggttgccgggcaacggtgcaaagttaactttgcggttaatacgctggggttctcccgcagcttccatgtcttcgccgcaccaaaacaggatgctgagcatacctacgaatcactggttcgcgccttccgctacttcggtggttgtgtgaaaacggtgctggttgataaccagaaggctgcggtgctgaagaataacaacgggaaagtcgtgttcaactccggattcctgttgctggctgaccactataacttcctgccacgggcatgccgtccacgcagggccagaacaaaaggtaaggttgagcggatggtgaaatacctcaaggagaacttcttcgtccggtaccgcaggttcgacagcttcactcatgtcaatcaacaactggagcaatggatagccgatgtggctgacaaacgggagcttcgccagttcaaagaaacgccggaacagcgcttcgcgctggagcaggaacatctgcagccgttaccggatacagacttcgataccagttacttcgatatccgccatgtgtcctgggacagctatatcgaggttggtggtaatcgttacagcgttcccgaagcgctgtgtggtcagccggtatcgatacgaatatcgctggatgacgagttgcggatctacagtaatgagaaactggtggcctcacatcgcctctgttcagcatcgtctggctggcagacagtgccggagcatcacgccccgctctggcagcaggtcagtcaggtggaacatcgaccactgagtgcctatgaggagctgttgtgatgcatgaactggaagtcctgctgagtcgcctgaaaatggagcatctgagttatcacgttgaaagcctgctggaacaggcagctaaaaaagagctgaactaccgggagttcctgtgcatggcgctacagcaggaatggaacggcaggcatcagcgcggtatggagtccaggctgaagcaggctcgtctgccgtgggtcaaaacgctggagcagttcgactttaccttccagccgggcatcgaccgtaaggttgtccgggaactggctggtctggcgttcgtggagcgcagcgaaaacgtgatcctgctgggccctcctggtgtcggaaaaactcatctggccatagctcttggcgtgaaagcggtggatgcgggacatcgggtactgtttatgccactggacagactgatcgcgacactgatgaaagcgaaacaggaaaaccggctggagcgtcagctacagcaactgagttatgcccgggtgttgatcctggatgaaataggctatctgccgatgaacagagaggaagccagtctgttcttccggctactgaaccgtcgatatgaaaaagcgagcatcatactgacgtcaaacaaagggttcgcagactggggagaaatgttcggagatcacgtactggcaacagcgatcctggatcggctgctacatcactcaaccacgctgaatatcaaaggagagagttaccggttaaaagagaaacgtaaagctggagtgctgaccaaaaacacaacgccaatcagtgatgatgaaatggtggaaagcggacagcatcagtaacgaaagtatttagcgggcatgaaaatggcaaataacggtcaaacatcgtggcgttgacagtttggtccgactctcacttttttatttgtttcaccattacttaatcccattatcgtcggactaatgtggatgacctttggttggaaagtcaccttgttgtacgcgattatcgcagccggcgtctccgttcttgccagtattatcctggattctctggggtttgaacgtcatatcattgccagtaaaagctcatcagcaaattgttgtgctccagcaaaaacttcgccgggaacgacatatacgcccataaaagtgagttgttgtagtccagcggctaaagccattgagaaccccgtagttacctgttgcagtaccaaagctgtagtaagtattaatcccataaaactagccaccaaagatgcgttgcaacagtttaaagatgtactgccatatcttttgttaggagtattaataggatcttttatttatggctttattccctcagcgtggattgccgctcatgcaggagcagataatcccttcgccatcccattaagcgccgttgtcggtattccgctgtatatccgggctgaggcggttatccctctggcatctgttctgatgacaaaaggaatgggtctgggagcattaatggcattaatcatcggcagtgccggcgcaagcctgacggaagtgatattacttaaatcaatgttcagaatgccgatgatagctgcattcctgacggttatattaggtatggctatcttgatgggctatttgactcaattgctattttaaatagatgccagcagtaaactataagatgcatagttagtgccatatccttctaagtagaaaatcatagacaggataatccttaaaaatcacaaatgatttaactaatgcattgagaatgatgacggctcggtcaacaagtcatcaacagacaataaccacgtaatcatgcttctctgacattttatcggagaagcaatgtgaggtagcctgagtttaacggacactccttcctgaaatagaatggcatcagaaggagctaataatgagcagaaaaacccaacgttactctaaagagttcaaagccgaagctgtcagaacggttcctgaaaatcaactttcgatcagtgaaggcgcttcccgattatctcttcctgaaggcactttaggacaatgggttaccgccgccagaaaagggctcggtactcctggttcccgcacggtggctgaactggaatctgaaattctgcaactgcgtaaggcgttaaatgaagctcgccttgagcgagatatattaaaaaaagcaacagcgtattttgcacaggagtcgctgaaaaatacgcgttaatcgaacaatggcgacaacaatttcccattgaagcgatgtgtcaggtatttggtgtatccaggagcggttattacaactgggtacagcatgaaccctcagacagaaaacaaagtgatgagcggctaaaactggagattaaggtggcacatatccgcactcgcgaaacatatggaacccggcggctccagacggagctggcagagaatggcatcatcgttggtcgtgaccgactggcacgtcttcgtaaggagctaaggctacgctgtaagcagaaacgcaagttcagagcgactacgaactcgaaccacaatctgccagttgcgccaaatctgctgaaccagacgttcgctcctacagcaccaaatcaggtctgggtggcggacctgacgtatgttgccacacaggagggatggttgtacctcgctggcatcaaagatgtttatacgtgcgaaattgtcggctacgccatgggagagcgcatgacaaaagagctgacaggtaaagccctgtttatggcgctcaggagccagcgcccacctgccgggctaatccaccactctgatcgaggttcacagtactgcgcatacgattaccgggtcatacaggagcagtctggtctgaaaacatcaatgtcgcgtaaaggtaactgttacgacaacgctccgatggaaagcttctggggaacgctgaaaaatgagagcctgagccactatcgttttaataaccgggatgaagccatctcagtaatacgggaatacattgagattttctacaatcgtcagcgtcgtcactctcgtctggggaatatctccccggcagccttcagggaaaaatatcatcagatggctgcttaaaaaaagaacaaatggtagtgtccgctattgccagtacacctcaatgactctttgtctcagtaccctcctcctttttaaaaggcagatttcagtcgctaatacaacacatttttaaatacactttaacctagttcattattacactagactggccccctgaatctccagacaaccagtatcacttaaataagtgatagtcttaatactagtttttagactagtcattggagtacagatgattgatgtcttagggccggagaaacgcagacggcgtaccacacaggaaaagatcgcaattgttcagcagagctttgaaccggggatgacggtctccctcgttgcccggcaacatggtgtagcagccagccagttatttctctggcgtaagcaataccaggaaggaagtcttactgctgtcgccgccggagaacaggttgttcctgcctctgaacttgctgccgccatgaagcagattaaagaactccagcgcctgctcggcaagaaaacgatggaaaatgaactcctcaaagaagccgttgaatatggacgggcaaaaaagtggatagcgcacgcgcccttattgcccggggatggggagtaagcttagtcagccgttgtctccgggtgtcgcgtgcgcagttgcacgtcattctcagacgaaccgatgactggatggatggccgccgcagtcgtcacactgatgatacggatgtgcttctccgtatacaccatgttatcggagagctgcccacgtatggttatcgtcgggtatgggcgctgcttcgcagacaggcagaacttgatggtatgcctgcgatcaatgccaaacgtgtttaccggatcatgcgccagaatgcgctgttgcttgagcgaaaacctgctgtaccgccatcgaaacgggcacatacaggcagagtggccgtgaaagaaagcaatcagcgatggtgctctgacgggttcgagttctgctgtgataacggagagagactgcgtgtcacgttcgcgctggactgctgtgatcgtgaggcactgcactgggcggtgactaccggcggcttcaacagtgaaacagtacaggacgtcatgctgggagcggtggaacgccgcttcggcaacgatcttccgtcgtctccagtggagtggctgacggataatggttcatgctaccgggctaatgaaacacgccagttcgcccggatgttgggacttgaaccgaagaacacggcggtgcggagtccggagagtaacggaatagcagagagcttcgtgaaaacgataaagcgtgactacatcagtatcatgcccaaaccagacgggttaacggcagcaaagaaccttgcagaggcgttcgagcattataacgaatggcatccgcatagtgcgctgggttatcgctcgccacgggaatatctgcggcagcgggcttgtaatgggttaagtgataacagatgtctggaaatataggggcaaatccatacacatctaaaacatcacaaaaaaaatcacttcacacactatcagagaacataataactttttaaaatgagcgcattttgatagttgttaacgatttcctttacgatactatcactaccctttttttatacacaaatattaccgggtggagataaaagggaaatcaaaggtaattatatcaggaagatataacgcattacatttattgtgtgtagaagaaaatccattcctgttctaattatccaatttaaacatcttagcataaaacaaatgatgaataaggaattttatgtcaattgactttaccccaggtataataaatacatatcacggcgatatttataactgcacaacaaataccgataatgctaaaacgccagacacaccgaagtggccttgcgataattgggaagaacaacaacccattaattccacattctctggagaaggatatatctctgatcaatatgatttagtgcaacaccaacttcaacaaattaatgcgtgccacacgaacactacatatacaaatgcagactactcaaaagttgtggctcaacttgtaagtcttattactaacattgaaacgataagttcgacacaacttacgcaacagacacaatcaatacttaatcagattaataacattagatatgaaaaaaacaaaagtgctgaatgtcgaatcattgttgtcgctaatcctaaacccgacaaggcaatcataactaaaattagcgtagaagagggaatacccataacattcagtgtccaaaccatgttttcagatactaattttattgctgaacaacgagctgacttaccaactaatataaaagatattcaaagcctgtatcaaaaaatgacgaagttatatattgagcacagtgaaaataaaaacaggatgaaagtctttgccggagccaactttattgatttcaatatgacaggacagaacctgtccgggttcgttctaaccttgtcaaggttttatttcgaagatctacttaatataaatttcactgacgcaaatttaggtgacactattttttacataaagaacaccctacccccaaattatataaagatggacaatatcttgacaaacaaatcgaaggtttattttcaacattattaaccattaatgacaactttttacgagcaaaagcggaaattgcttcgacaataattaaatttttagaggccaggataaccaatctttcatacaatgacatattaaaatatcagcaagaattccaaaaacaatgttataagcaagttaaagcctttacgacactctctcgatacaataaaattcaaacatgggcagaaatgtctgaatatcagttcgaagtatttcaatacgagacgcttaaccccaaaaaaatgtcacacacgccttatttaaagaggccacttcctaatgaaaaagatataaattatggggtggaaatagaaataccatctggcaaaagaattcgcttatcaaatcattatcagaatataataccataatattgattattagcactttataattattgaatgaaaatagattttatgtaattttaaaacaaaggaggtaatgactccaacttattgatagtgttttatgttcagataatgcccgatgactttgtcatgcagctccaccgattttgagaacgacagcgacttccgtcccagccgtgccaggtgctgcctcaaattcaggttatgccgctcaattcgctgcgtatatcgcttgctgattacgtgcagctttcccttcaggcgggattcatacagcggccagccatccgtcatccatatcaccacgtcaaagggtgacagcaggctcataagacgccccagcgtcgccatagtgcgttcaccgaatacgtgcgcaacaaccgtcttccggagactgtcatacgcgtaaaacagccagcgctggcgcgatttagccccgacatagccccactgttcgtccatttccgcgcagacgatgacgtcactgcccggctgtatgcgcgaggttaccgactgcggcctgagttttttaagtgacgtaaaatcgtgttgaggccaacgcccataatgcgtgcagttgcccggcatccaacgccattcatggccatatcaatgattttctggtgcgtaccgggttgagaagcggtgtaagtgaactgcagttgccatgttttacggcagtgagagcagagatagcgctgatgtccggcagtgcttttgccgttacgcaccaccccgtcagtagctgaacaggagggacagctgatagaaacagaagccactggagcacctcaaaaacaccatcatacactaaatcagtaagttggcagcatcaccaacaaaggattatattatggggcgatggatactcatgccacgccccaaaatcaatggaattgaactaaacaaaagggatataaacatcagacaggtttacgttactatcaggcatatcgcctcagaatcagatgaaaactataaagaaatatctattatggttttaatatttgttgataaggatagtaacatgaacatgacaaaaggtgcactcatcctcagcctttcatttttgcttgccgcatgtagttcaattccgcaaaatatcaaaggcaataaccaacctgatattcaaaaaagttttgttgctgttcataaccagccggggttatatgttggtcaacaagcgcgctttggtgggaaggttatcaacgttatcaatggcaaaacggatacgttgttagaaatcgctgtattaccgttggatagctatgcgaaacctgatattgaagccaactatcagggccgactgctcgccagacaaagcggcttccttgacccagtgaactatcgtaatcactttgttaccatcctcggtaccattcagggtgaacaacctggctttatcaataaagtcccgtataacttcctggaagtgaatatgcagggcatccaggtgtggcatttgagagaagtggttaataccacctataacctgtgggattacggctatggtgcattctggccggaaccgggctggggtgcgccttactacaccaatgcggtgagtcaggtaacacctgagctggtcaaataacaccaccgaaagatgcagatgctttctcagcatctgcatcatgtattacataaaattaatatacagtaagctaactattattattataagccctgtcctgttaattacctttggcaaattgattataaagttaatgtccgcaccaggagtcggttatgtttcttataattaccagggatacgatgttcttcaccgcgatgaaaaacattctgagtaaaggtaatgtcgttcatatacagaacgaagaagagatcgacgtaatgttgcatcagaatgccttcgtcattattgatacattaatgaataatgtatttcattctaattttctcactcaaattgaacgattaaaacctgtccatgtcattgttttctccccctttaatattaaacgctgtctggggaaagtaccggtgacctttgttccgcggactatcactatcattgattttgtcgcactcatcaatggcagttactgctctgtgcctgaagcgaatgtgtcactttcgcgcaagcaacatcaggttctgagctgcattgcgaatcaaatgacaactgaagatattctggagaaactgaaaatatcgctaaaaacgttctactgccataaacacaatatcatgatgatcctcaatcttaagcggatcaatgagctggtacgccatcagcatattgattatctggtgtgaatttcaggcttacggtgagtctggctacgctgccacacagattagctaattgaaacgcctttcacccctgccataccttttaataatcgcaacaggtcttctatcgacgttgtggcatgaagctggatatcaatggcgaccacttcatgatcttcattttcctgcaacgaaactaaatcagtttttattttttgctgcttaaaccagtcgagcattgataccatattaccgttcactaatgtcagctgtaaatggtaatttttgttcatcaggcggaaggttaattgatggaagacttccagcaccaacaaggtcatcactgaaccataaatacccagttcgtacataccgctgccaataaccatacctatggcggcggtcacccagatatccgctgccgtcgtcagacctacaatattttggttacgaacgagaatgttacctgcaccgataaacccgacgcccgtcaccacctgagcagcaatacggctggggtcgagtccgacgtgatctaaagacagcacgtcagcaaaaccatatttcgaaacaatcataaacagggcgcttcccatgccaattaatacatgtgtgcgtaaccctgctcctttgccgcgcatttgcctttccatgccaatagcgccacaggcaattgccgcgagtataagacgtataataaattctgctgtcatataaaaatgcaaaaaggagcagcaagatggctcaacttgctactcctttttacttgtacctcattaattcggcaagtcattagatgcttgatttttgaaggtatacaaatttttctgcgggtttttcttacagtattcgatcactttaggaatttgagtgagatcggtttcatttaaagtaacggtatcgccacctttatatactgtttcttcatgcagcatccaccatgcaaccggggtcattgcttttggattcagatcaataaattcctggcaggtcatatctttagcggattcattggctgccagcgcagattgtgcgttcaccagtgacaaagccgctacagcgcccataaaaataaacgctttacggagagatgaaatattcattttgtaacccattcaatatagagattatatatgaacaggaggaatagctgcttttaaagaagatattccggcctgttcaatatgcaaggaagtacgatgtaacgcattcccggaattacatatctttcttaattttgtcccattcgcctttaactttatctttaaagttggcttgtttatcctgagtacaagcctgaacgatagctggggttacggttgcaataccctgaacatctaaaaccgcatcttctggtttatctttgttgttcagcgcttcagcaaaaccaactgcagttggctggaaggattcgtccacagccaggaaatcttcacaggtccaggagttgaccggttttttgttatcagctgctttttgcgcatccgctgcattgctcacaactggcagaagaagcagaccaccaagaataacgcctaatacttttttcatcgtaatatcctcaactataaagtgaaagagccgtcacgaatcaatttcgacactgaggttataacctggttttctgtatatgtcatgttgatataaaatatcaaaatcagatatttttatttcaatacaatgagttacagatgcatcagatactgtaattaggaaatttttattaaatcgactacattcttagacgcgtttttggcatagattgatagcaggggattttcttcttaattttatagggtggttctatgttatatatagataaggcaacaattttgaagtttgatctggagatgcttaaaaaacatcgcagagcaatccagtttattgccgtgctactgtttatcgtcgggttgctgtgtatcagtttcccgttcgtctctggcgatattttaagcacagtagtgggtgcattattaatctgctcgggcattgcgcttattgtcgggttattcagcaaccgcagtcataatttctggccggtattatccggtttcctcgtcgcagtcgcctatttattgatcggctatttcttcatccgcgcaccggagctgggcatttttgccattgcggcatttattgccggtttgttctgtgttgcaggggttattcgcctgatgagttggtatcgtcagcgttcaatgaaaggcagctggctacagctcgttattggtgtgctggatatcgtcattgcctggatattccttggtgcaacgccgatggtgtctgtaacgctggtttccacactggtgggaattgaactgatatttagcgccgccagcctgttcagcttcgccagtttgttcgttaagcagcaataattatcccggttgtcacccggatcatagtcacttgatatgactatgatccgattaatactctctccgctacggagtgttgtagatcaattgcgcactatcattgaaataattacctgctagtgattatttcaacctactgaatttcatctaatttttttcactccatggcaaattagccatttcaaacattatcatggctgatattttccgtagtcaggtttaatgttttaaaagtgctgtgggaaagtgaacaaagagttccgtaagcgttgatgctatgggcggttaaataagtaatccgggttcatttttttgcaactggcgttgattacattgcataaatatccgtgtctccagacgctatataaaaacctgaagacatgaatgcgttatttactcaggtaatttcaatgcgttaaaagaaagctggcaatccaattgccagcttaagtcgaaacaaggagactcgatatttaaatcggattacattttaactttagtaatattcttcagagatcacaaactggttattgataacttattcttgggcagtaatccgcaaacgttaactttttgtttactatttacaagctgataacaaccaggaatcttacttaggatcaatatatggagtgcgtgatggataaatctgaagtattgattagtgttaatagacgtattagttcacgaagggtaaagttcttataggcgtttactatattgaacaacgattcggacaaggatgtaaataatgaaaaggatgacatgttcgaaacgataacggctaaggagcaagttatgatttttctcatgacgaaagattcttttcttttacagggcttttggcagttgaaagataatcacgaaatgataaaaatcaattccctgtcagagatcaaaaaagtaggcaataaacccttcaaggttatcattgatacctatcacaatcatatccttgatgaagaagcgattaaatttctggagaaattagatgccgagagaattattgttttggcaccttatcacatcagtaaactaaaagctaaagcgcctatttattttgttagccgcaaagaaagtatcaaaaatcttcttgagattacttatggtaaacacttgccccataagaattcacaattatgtttttcacataatcagttcaaaattatgcaactgattctgaaaaataaaaatgaaagcaatatcacgtcgacgctcaatatttcgcaacaaacattaaagattcagaaattcaacattatgtacaagctgaaactaagacgtatgagcgacatcgtcaccctgggtatcacatcttatttttagtcaggacataagcaactgaaattgatggctggcatgacgagggatgcagatgctgatttcattacccccggtgattactaaaggagaggctaaaacgactttattccccaggtatgtgtatccaccagtagaacccttcgttgcccgaatgctggcaggaactgttggcagaacggcaacattttttttgtcgttgacctcaccatgtcgatcactgtgcctgtatcccaccttactggctgacaaccccactatgccgctggtctgtaaatccctcatatctctcctcgcgcgcaatttaaagaaccgttatttctcaagaattttcagggactaaaatgaacagaagaagaaagctgttaataccgttgttattctgcggcgcgatgctcaccgcctgcgatgacaaatcggcggaaaacgccgccgccatgacgcctgaggtcagtgtcgtcacactctcccccggttcggtcaatgtgttgagcgaattgcccggtagaaccgttccttatgaagttgccgagatacgtccccaggtgggcggtattatcattaaacgcaactttatcgaaggcgataaagtgaaccagggcgattcgctgtatcagattgatcctgcacctttacaggccgagctaaactccgccaaaggctcgctggcgaaagcgctctctaccgccagcaatgcccgcatcacctttaaccgccaggcatcgttgctgaagaccaactacgttagccgtcaggattacgacaccgcgcgcacccagctgaatgaagcagaagccaatgtcaccgtcgccaaagcggctgttgaacaggcgacgatcaatctgcaatacgcgaatgtcacctcgccgattacgggcgtcagcgggaaatcgtcggtgaccgtcggcgcactcgttaccgctaatcaggcagattcgctggttaccgtacaacgtctggacccgatttatgtcgatctcacgcagtcggtgcaggatttcttgcgcatgaaagaagaggtcgccagtgggcaaatcaaacaggttcagggcagtacgccagtacagctcaatctggaaaatggtaaacgctacagccagaccggcacactgaaattctccgacccgacggtggatgaaaccacgggctccgtgacgttacgggcgattttccccaacccaaatggtgacttgctgcctggcatgtacgtcacggcattagtggatgaaggtagccgccagaatgtattactggtgccgcaggaaggcgtcactcacaacgcccagggtaaagcaacggcgctcattctggataaagacgatgttgtgcagctacgcgaaattgaagccagcaaagccatcggcgaccagtgggttgtcacctctggcttgcaggctggcgatcgggtgatcgtttccggtttgcaacgcattcgtccgggtatcaaagcacgagcaatttcctccagccaggaaaacgccagcaccgaatcgaaacaataacgttgcaggcttaaggggactttcatggctaactattttattgatcgcccggtttttgcctgggtacttgccattattatgatgcttgcaggtggtctggcgatcatgaacttaccggttgcgcagtatccgcagattgcgccaccgaccattaccgtcagcgctacctatccaggtgccgatgcgcaaacggtagaagactcggtcactcaggtgattgagcaaaatatgaatgggcttgatggcctgatgtacatgtcttcaaccagtgatgcggcgggtaatgcctctatcactctgaccttcgagactgggacatctcctgatatcgcacaggttcaggtgcaaaataaactgcaactcgctatgccttcattacctgaagcggtgcagcagcaggggattagcgttgataagtcgagcagtaatattctgatggtagcggcgtttatttctgataacggcagcctcaaccagtacgatatcgcggactatgtagcgtctaatatcaaagacccgctaagccgtaccgcgggcgttggtagcgtacagctctttggttccgagtacgccatgcgtatctggctggacccgcaaaaactcaataaatacaatctggtaccttccgatgttatttcccagattaaggtgcaaaacaaccagatttccggtggtcaactgggtggcatgccacaggcggcagaccagcaactaaacgcctcgatcattgtgcagacgcgtctgcaaacgccggaagaatttggcaaaatcctgttgaaagttcagcaagatggttcgcaagtgctgctgcgtgatgtcgcccgcgtcgaacttggagcggaagattattccaccgtggcgcgctataacggcaaacctgctgccgggatcgccatcaaactggctaccggagcaaacgccctggatacctcgcgggcagtcaaagaggagctgaaccgcttatcagcctatttccccgcaagtctgaagacggtttatccttacgacaccacgccgtttatcgaaatttctattcaggaagtttttaaaacactggttgaggctatcatcctcgtcttcctggtcatgtatctgtttttgcagaatttccgtgccacaatcatcccgacgattgccgtaccggtggttattctcgggacgtttgcgatcttgtcggcggtcggtttcaccatcaacacgttaactatgttcgggatggtgctggcgatagggttactggtggatgacgccatcgtggtggtggagaacgtcgagcgtgtcattgcggaagataagctaccaccgaaggaagcgacgcataaatcgatggggcagatccaacgtgcgctggtcggtattgctgttgttctttccgcagtgtttatgccgatggcctttatgagcggcgcaaccggggagatctaccgccagttctccatcacgctgatctcctccatgctgctttcagtatttgtggcaatgagcctgacccctgccctgtgcgccaccattctgaaagccgcgccggaaggcggtcacaaacctaacgccctgttcgcacgcttcaacacgctgtttgaaaaatcaactcagcactataccgatagcacccgctcgctgttgcgttgtaccggtcgctacatggtggtctacctgctgatttgcgccgggatggcggtgctgttcctgcgtacaccgacctctttcttaccagaagaggatcagggggtatttatgaccaccgcgcagttaccttccggtgccaccatggttaacaccacgaaagtgctgcaacaggtgacggattattatcttacaaaagagaaagataatgttcagtcggtgtttaccgttggcggctttggcttcagcggccaggggcaaaacaacggcctggcgtttatcagtctcaagccgtggtctgaacgtgtcggtgaggaaaactcggttaccgcgatcattcagcgggcaatgattgcgttaagcagtatcaataaagccgtcgtcttcccgttcaacttacccgcggtggctgaactgggtaccgcgtcaggttttgatatggaactgctggacaacggtaacctggggcacgaaaaactaacccaggcacgaaacgagctgttatcactggcagcgcaatcgcctgaccaggtcaccggggtacgcccgaacggcctggaagatacgccgatgttcaaagtgaacgtcaacgccgcgaaagctgaggcaatgggtgtggcgctgtctgatatcaaccagacaatttccaccgccttcggcagcagctacgtgaacgacttcctcaaccaggggcgggtgaaaaaagtgtatgtccaggcaggcacgccgttccgtatgttgccggataacatcaaccaatggtatgtacgcaacgcctctggcacgatggcaccgctttctgcctactcgtctaccgaatggacctatggttcaccgcgattggaacgctacaacggcatcccgtcaatggagattttaggtgaagcggcggccgggaaaagtaccggtgacgctatgaaatttatggcagacctggtcgctaaacttccggcaggcgtcggctactcatggaccggactgtcgtatcaggaagcgttatcctcaaaccaggctcctgcactgtatgccatttcactggtcgtggtgttcctcgccctcgccgcactctatgagagctggtcaattccgttctcggtgatgttggttgttccgttaggcgtcgttggcgcattactggccaccgatctgcgcggcttaagtaatgacgtctacttccaggttggtttgctgaccaccatcgggctttccgccaagaacgccatcctgattgtcgaatttgccgttgagatgatgcagaaagaagggaaaacgccgatagaggcaatcatcgaagcggcgcggatgcgtttacgcccaatcctgatgacctctctcgcctttattctcggcgtgctgccgctggttatcagtcatggtgccggttctggcgcgcaaaacgcggtaggtaccggcgtgatgggcgggatgtttgccgcaacagtgctggcaatttacttcgttccggtctttttcgttgtagtggaacatctctttgcccgctttaaaaaagcgtaacgtgtaaatgagagtaaggttgaacgtgaaggttcagccttactctttcctgctaaccattcaccactcaacaaccagctaaccgtcaggaataccaggcttagtacacagcactgaaagtagaaaccactccagccattcgtcatcaatttgaacagcacaatactgacccacattcccgtaatcgtatgaattgtcagcttaataatcccaaacatgccgagtcttttcctcctgaaaatacctataccgcctggcaaactgcgaaagagaactagccggtagcccggcagaaatcatcagggaagagtttcacatgaagcaggtgtgagatcctgaccaatattcaaatgcaaaatatgtcaggaaaaggtacctggcgaatgttgcgcaaactgatgtggcgttacaccataatattgtcgaaatgtgtttataaagtacgacgtactgctatagccacatttttctgcaatagtatgcagaggaatttgacgtaactcgagtaatcgtctggccatcgacatcctggaagcgagtaatattttactgaaacaggtattttcatcctgcaactttttttttatgagactctcgctggtatacattctttccgcgatatcgcgcagataccaacgtttggcgatatcaaagctaataaggcgttcaacttttcctgaaacagtgctgatgctattgaaaagtaaggggatcagttctttcttatgagaaaacatcgataaacaggaaaggtagagcatattgctcagtatcggtgaatttaccccggattcattgaagctatcaaaaatcgccgtcaccagcggcatggggggtgactggttaattaatagacggtctttgctatgtaaccctaaattgcgtggtagctgacgaatattttgtaagtaatggcaaactgtcagctcatcgatatccagtcgtcgcgtatccggtgaacaaaacgcaaaatcgtctgccaaatttttctccagcagcacgatactctcgttatgcagcgatattttatgctgttcatgataaatatcgaatgaacgacgaatgaggatcaccgagcagacatgagtcatgattatcccttatatttcatactgcgattatttcaatttcagtatactaatgaaatgttgccagactgtttcttagcgaaaaaactgccagatttggtaggaccaaaatttatccacaaagtagttttgcataacagttaattgataataagtaaatgcagcacgaatatattttcgcacagcgtatagcttatgtttataaaaaaatggctgatcttatttccagtaaaagttatatttaacttactgagagcacaaagtttcccgtgccaacagggagtgttataacggtttattagtctggagacggcagactatcctcttcccggtcccctatgccgggttttttttatgtctgagtaaaattctataatcttattccttccgcagaacggtcagtgccgtaaaaatttccttgcgcaacaatacttgccgccgagtcacggttcggcaatccctgcgccgatcgctcctgatactctgtgggcgtcatcccataataatttcgaaagacgtaaatgaaatacgacacgctgtgatatccacaggacactgcgactcgcttaattgaaaagccatgtataacaataagttgcaaagcacgttgcattctacactcagtaagcaactgtgaatatgatgtctcttcttcgcgcaattttttctttaacaggcttggactcatcaacagctcgctggcgattcgggctagtgtccactcatgggcgatattattattgataaccgtacaaactcgtgttcgcatgttcggttgcaaaacgttcaaaagcagcggtataaagtgctcatcctcaagaaaaacagataacaacgcaaagattaatgctcttttacgtagcatttctgcatagcgaagattcttattctgcgatagttgcgcaacttcctgaaaaacaggaatatctctgctacagtgatgaacgagtaatgaagaaatttttttatgtgcatgaagatttaatgcctcctccttgagcatcggcagaaataatgaaagcgtatcccttgatactaatacaaaattttcaacacacttatctactcgaatttggcttgcatccgcaaaaaccaggtcaccgccattaaaatagcgatattcaccattaaccatggtgagaatatatttatgtcttgcgtacgcaattagacaattcccatgtaatgattgcatagttgacttaatattacataaacatattactgttaattaatgtagcacgccgccctcttaagtcaaattgattgataaataaatttaaacgaagcgggagaacaggatgataatgtgtgatgttctacgggcaggatgactggatttataatacaaaaatgtgtttaagaacgcagtgaaattaatagcaagcaaataatcccttttcgtgacattaaaggcaatcgctacatttaataaacattcatataacatatatcttatcaacacgatgaatagacagccaatatattattgcgattaataagcaaccgaatgcccagctgtttttttaaaggctgggcattcggtttttacaacgttatgttatcaggtgtgtttaaagctgttctgctgggcaataccctgcagtttcgggtgatcgctgagatatttcagggaggctttgtagtcttccagcaacagttcagcaaagtccatttcgaagccgcgacgacacataatgcgcatcaccacgatgtcggtggcttcaccgccgagagtgaaggccggaacctgccagccgcgcagacgcagacgttcagagaggtcgtacagggtgtatcccggatcttcaccatctttcagtttgaagcaaaccgccgggatgccttcgtccgggcgacccgtacagatgaactcatacggccccagtttggcgatttcatccgccagataagcggcaacctggtaagaggcgttctgtactttggtatagccttcacgaccgaggcgcaggaattcatagtactgtgcaattacctgacccgccgggcgggagaagttgatggcaaaagtaccaatttgaccacccaggtagtcaacgttgaacaccagttcctgcggcagcgcttcttcgtcacgccagataacccagccgcagcccagcggagccagaccgaatttatggcctgaagcactgatcgatttcacacgcggcaggcggaagtcccagacgatatccggggcgacgaacggtgccaggaagccaccgctggcagcgtcgatgtgcatgtcgatgtcgataccggtgtcggcctggaatttatccagcgcatcgtgcagcggttgtgggaactcatagttaccggtgtaggtcacgccgaaagtcggcaccacgccgatggtgttttcgtcacaggcttcaatcatgcgtttcgggtccataaacaactgaccggggcgcatagggatctcacgcagctccacatcccagtagcgggcgaatttatgccagcagatttgtaccggaccgcacaccaggtttggtttatccgttggtttgcctgcagcttccatacgcttgcgccaacgccatttcatcgccatcccgccgagcatacaggcctcggaagaaccaatggtgttggtgccaacggcctgaccatttttcggcgcaggcgcatgccacagatcggcaaccatatttacgcaacgcaggtcgatggctgcggattgcggatattcttctttgtcgatccagtttttattgatcgacaaatccatcaatttatggacgttttcgtcgtcccaggtctggcagaaagtggccaggttctgacgagcgttgccatcaagatataattcatcattgataatctggaatgcgacatcatcgcgcatttcgtgcagcggaaatcgttttgactccgcgatagtagaaatggcctttgcgccaaaacgtgaatcgagtagttctgagcggaaatccgttaacagcttctggtccatttcgaactccttaaatttatttgaaggcaataaaaaagtaggatttatccgcaatggaagcaaggcattacaggcttaatttaaataacaaaatcctaagcagaaaaacgactttttataatataaacatttaacatgataatattaaaaacagactttattatcgtaataaaaatcgcccaaacattcctgttcgggcgatcaaattaattattgtttatcctgcatatacggcgtgtacaccccgttcagactgtgcaggaaagctacgatatcatccacatcctcctgcggcagctctttgcctacctgatagcgcagcatcagtttcaccgccccgtccagcgtcggcacgtcaccgcgatggaagtacggtgccgttaaagcaacgttacgtaaaccgggtactttctgacgcaatttatcacgctcttctttagtaacattcatacgaccaatatccgccgccgtaatttccccaaagttaaagtcttttttcagccccaacggttcaaaggaacgtccaccgagaataataccaccatgacaagttgcacatttattatctttaaataattgatagccttttttctgttgcgccgtcagcgcattttcatctccacgcaaccatttatcaaatggggaatccggcgtaattaatgttttctcaaattcagcaatggcatcagtaatattttcgccactgaaaccttgcggatagacgccgaggaactgcgctttaagctgcggatctttttccagcttagcaataatttcgtcccaagatttcgacgccatttcaatcgggttcaacggcggtccaccagcctgatcctgcaatgttgccgcacgaccatcccagaactgctcaacgttaaatactgagttaaataccgtcggcgcgttaatcggcccaactgcgccaccaacaccaatcgatgtttttctgccatcgacgccccccgcattcaacgcatggcaatgagcgcatgaaatggtgctatcagccgataaacggggatcgtgatacagcgcaaagcccaacgccactttttgcgcatcggtaggcagtttttgcgggatgggctgcaccggttcattgcgatgctccggagcagtatcattgctggcgtaatattccgcgcgctgttttgcaatccaggccagtatttccgcccgctcttcatcactcaccttacccgcccagtgaagcgcggtataacgcgttggcggcatagtttcatactgcatcacccattcaatcttattcagatcgctttgcgaaacgggtttatcagccagcagtgccgcacgcacggcctcgaggttaaaagatttatatccaagcttaatgtcgtaatccatcaactgtttcgcgccaggaatataataataggcgggtaattctgccgaaggcgtgtggcaatagtcgcatcctttttcgcggagaaaacctaaaaccttattattttcactgacagcggatgcctgaacatcggcctgtttactgcgtttattatcgtggtaccacacataaccagataaccctaaatagcaaatcgcgacgccagccaggccgatcgcggtaatacgtgagaccattttcattattcttccctcacggtggtgagttattgtgacccagaaaattttccagaatgctgcaaacgtctctgcgagacaaagccatcataaaaaacagtgagatacgctttttgataggaatcaatcaattacatgaatataaactatcaataagatagcctgtgcctattacccagatcaggaatggcatatcatgattgcggcgagagcaggattgaatgttctgaaaatgaaaaacaacacgaaatccgtatttttataaattccatggatattagtgcgttatattttttgacaggttaataaacgtgatccaccgcacgctttgtcgcccaccaggcggagcgaatgactacccttaaagaaaagcccgataattagcgacgaatttcggaggttggatccttatgctcaatcagaaaattcaaaaccctaatccagacgaactgatgatcgaagtcgatctctgctatgagctggacccgtatgaattaaaactggatgagatgatcgaggcagaaccggaacccgagatgattgaagggctgcccgcctctgatgcgctgacgcctgccgatcgctatctcgaactgttcgagcatgttcagtcggcgaaaattttcccggacagtaaaacctttcccgactgcgcacctaaaatggacccgctggatattttaatccgctaccgtaaagtgcgccgtcatcgtgattttgacttgcgcaagtttgttgaaaatcacttctggctgccggaggtctactccagcgagtatgtatcggacccgcaaaattccctgaaagagcatatcgaccagctgtggccggtgctaacccgcgaaccacaggatcacattccgtggtcttctctactggcgctgccgcagtcatatattgtcccaggcggccgttttagcgaaacctactattgggactcctatttcaccatgctggggctggcggaaagtggtcgggaagatttgctgaaatgcatggccgataacttcgcctggatgatcgaaaactatggtcacatccccaacggcaaccgcacctattatttgagccgatcgcaaccaccggtttttgcgctgatggtggagttgtttgaagaagatggtgtacgcggtgcgcgccgctatctcgaccaccttaaaatggaatatgccttctggatggacggtgcagaatcgttgatccctaatcaggcctatcgccatgttgtgcggatgccggacggatcgctgctcaaccgttactgggacgatcgcgacacgccgcgtgacgaatcctggcttgaggacgttgaaaccgcgaaacattctggtcgcccgcccaacgaggtgtaccgcgatttacgcgcgggggcggcctccggttgggattactcttcccgttggctgcgtgatactggtcgtctggcgagcattcgtaccacccagttcatccccatcgatctgaatgccttcctgtttaaactggagagcgccatcgccaacatctcggcgctgaaaggcgagaaagagacagaagcgctgttccgccagaaggccagtgcccgtcgcgatgcggtaaaccgttacctctgggatgatgaaaacggcatctaccgcgattacgactggcgacgcgaacaactggcgctgttttccgctgccgccattgtgccgctctatgtcggcatggcgaaccatgaacaggccgatcgtctggcaaacgccgtacgcagccggttactgacacctggcgggattctggcaagcgagtacgaaaccggtgaacagtgggataaacccaacggctgggcaccgttacaatggatggcaattcagggatttaaaatgtatggcgatgaccttctgggtgatgaaatcgcgcgcagctggctgaaaacggtgaatcagttctatctggaacagcacaaaatgatcgagaaataccatattgccgatggtgttccccgcgaaggcggcggtggcgagtatccgttgcaggatgggtttggctggactaacggtgtggtacgccgtttaattggtttgtacggcgaaccataatatttttacagccagccgctaacttcctgctggctgtaaaattatcctcttcaggaggagtaatgccgatcagttaaggatcagttgaccgatccagtggctgtgtaagaatccggaaacgctcacttgtttccggatttttttatgcacattggacaggctcttgatctggtatcccgttacgattctctgcgtaacccactgacttctctgggggattacctcgcccccgaactcatctctcgttgccttgccgaatcaggtactgtaacgctacgcaagcgccgtcttcccctcgaaatgatggtctggtgtattgttggcatggcgcttgagcgtaaagaacctcttcaccagattgtgaatcgcctggacatcatgctgccggacaatcgccccttcgttgcccccagtgccgttattcaggcccgccagcgcctgggaagtgaggctgtccgccgcgtgttcacgaaaacagcacagctctggcataacgccacgccgcatccgcactggtgcggcctgaccctgctggccatcgatggtgtgttctggcgcacaccggatacaccagagaacgatgcagccttcccccgccagacacatgccgggaacccggcgctctacccgcaggtcaaaatggtctgccagatggaactgaccagccatctgctgacggctgcagccttcggcacgatgaagaacagcgaaaatgagcttgctgagcaacttatagaacaaaccggcgataacactctgacgttaatggataaaggttattactcactgggactgttaaatgcctggagcctggcgggagaacaccgccactggatgatacctctcagaaagggagcgcaatatgaagagctcagaaaactgggtaaaggcgatcatctggtgaagctgaaaaccagcccgcaggcacgaaaaaagtggccgggactgggaaatgaagtgacagcccgcctgctgaccgtgacgcgcaaaggaaaagtctgccatctgctgacgtcgatgacggacgccatgcgcttccccggaggagaaatggcggatctgtacagtcatcgctgggaaatcgaactgggatacagggagataaaacagacgatgcaactgagcaggctgacgctgagaagtaaaaagccggagcttgtggagcaagagctgtggggtgtcttactggcttataatctggtgagatatcagatgattaaaatggcggaacatctgaaaggttactggccgaatcaactgagtttctcagaatcatgcggaatggtgatgagaatgctgatgacattgcagggcgcttcaccgggacgtataccggagctgatgcgcgatcttgcaagtatgggacaacttgtgaaattaccgacgagaagggaaagggccttcccgagagtggtaaaggagaggccctggaaataccccacagccccgaaaaagagccagtcagttgcttaactgactggcattactccttagtggtgggtgttccggttccggacaatattcacccgatgatcaaagacgaagcaggagtctggtcgtggcgcacgcctgtcctgaaaggcaacctgtatgagtattttttcaatgttgatggtgtacgcagcattgatataggcaccgcaatgactaagcctcagcgccaggttaactccagtatggttctggtgccaggcagttatctggatacgcgttctgttgcgcatggtgatttgatcgccataacttaccactccaacgcattgcaatctgaacgtcagatgtatgtctggaccccgccaggatacaccggcatgggcgagcctttgccagtgctctatttctatcacagttttggtgataccggacgttccgctatcgatcaggggcgtatcccgcaaatcatggataacctgctggctgaagggaaaattaaaccgatgctggtggtgatcccggataccgaaaccgatgcgaagggcattattcccgaagatttcgtgcctcaggaaagacgtaaagtcttttatccgctgaatgctaaagcggcagatcgcgaactgatgaacgatattatcccgctgattagcaagcgttttaatgtccgtaaagatgccgatggtcgcgcgctggcagggctttcacaaggcgggtaccaggcgctggtttccggaatgaatcatctggaaagctttggctggctggccacattcagtggtgttaccacgacaaccgtaccggatgaaggtgtcgcggcccggctgaacgatccggcagctattaaccagcaactacgtaattttactgtggtcgttggtgataaagatgtcgtaaccggcaaggatatcgccgggctgaaaactgagcttgagcagaaaaaaattaagtttgattaccaggaatatcccggcctgaaccatgaaatggatgtctggcggcctgcctatgcagccttcgtacagaaattatttaaataaaataaggcattaagatgaaattaatcattaccgaagattaccaggaaatgagccgtgtcgcggcacaccatctgcttggttatatgtcgaagacgcgtcgtgttaacctggcaattaccgccggtagcacgcccaaaggcatgtatgaatacctcaccaccctggttaaaggtaagccctggtacgataactgctatttctataatttcgatgaaattccctttcgcggcaaagagggagaaggcgtaacgattaccaatctgcgtaatctgtttttcacccctgcggggatcaaagaagagaatatccagaagctcactattgataactaccgcgagcatgatcagaaactggcgcgtgaaggcggcctggatttggtggtgctgggattaggtgcagggtgatgctgccaacttactgatttagtgtatgatggtgtttttgaggtgctccagtggcttctgtttctatcagctgtccctcctgttcagctactgacggggtggtgcgtaacggcaaaagcactgccggacatcagcgctatctctgctctcactgccgtaaaacatggcaactgcagttcacttacaccgcttctcaacccggtacgcaccagaaaatcattgatatggccatgaatggcgttggatgccgggcaactgcacgcattatgggcgttggcctcaacacgattttacgtcacttaaaaaactcaggccgcagtcggtaacctcgcgcatacagccgggcagtgacgtcatcgtctgcgcggaaatggacgaacagtggggctatgtcggggctaaatcgcgccagcgctggctgttttacgcgtatgacagtctccggaagacggttgttgcgcacgtattcggtgaacgcactatggcgacgctggggcgtcttatgagcctgctgtcaccctttgacgtggtgatatggatgacggatggctggccgctgtatgaatcccgcctgaagggaaagctgcacgtaatcagcaagcgatatacgcagcgaattgagcggcataacctgaatttgaggcagcacctggcacggctgggacggaagtcgctgtcgttctcaaaatcggtggagctgcatgacaaagtcatcgggcattatctgaacataaaacactatcaataagttggagtcattaccgttttcaggatgatgccagcatagaaggtgttgaatttgagtatgatgaagaggacgaatttgccggtattaagaacacatatcctgatgaaatgctgaaagagttggttgaacgcacgccaggttatcatggatggcaacaggaattctggcttgcgcattgtggcgatttctgtgcttttatcggctatgtgggctggaatgatataaaagatcgcctcgatgaatttgccaaccttgaagaagattgtgagaatttcggtattagaaattctgatctagctaaatgcctgcaaaagggtggtgattgtcagggttatctcttccgctgtctccactgcggcaagctgagactgtggggtgatttttcgtagttatttaaataatgagaacaggccggagcgtaattcatacatccggccttatttcttcagcttaaccgagcgctaattctgcggcagcggctttatcagcgattactatcagcgaaggatgcagctgcaacacggaagctggaacatcttcggtaaccggaccttgcagcacatttttcagtgcctgcgctttacctgcgccactgacaattatcagcaagtttttcgccgccatgatgcttttcggccccatcgtcacgtagctgtcaggcactaacgaaaagtcgccgcccaactcaccatgcgccacaatatcaaccatctctccctggatcgggaactccacggtttgctcatggaaatgggtcgtattcggcaaattgccacaaaaatgaccatctgcacctaggtaatgaatccaacttattgatagtgttttatgttcagataatgcccgatgactttgtcatgcagctccaccgattttgagaacgacagcgacttccgtcccagccgtgccaggtgctgcctcaaattcaggttatgccgctcaattcgctgcgtatatcgcttgctgattacgtgcagctttcccttcaggcgggattcatacagcggccagccatccgtcatccatatcaccacgtcaaagggtgacagcaggctcataagacgccccagcgtcgccatagtgcgttcaccgaatacgtgcgcaacaaccgtcttccggagactgtcatacgcgtaaaacagccagcgctggcgcgatttagccccgacatagccccactgttcgtccatttccgcgcagacgatgacgtcactgcccggctgtatgcgcgaggttaccgactgcggcctgagttttttaagtgacgtaaaatcgtgttgaggccaacgcccataatgcgtgcagttgcccggcatccaacgccattcatggccatatcaatgattttctggtgcgtaccgggttgagaagcggtgtaagtgaactgcagttgccatgttttacggcagtgagagcagagatagcgctgatgtccggcagtgcttttgccgttacgcaccaccccgtcagtagctgaacaggagggacagctgatagaaacagaagccactggagcacctcaaaaacaccatcatacactaaatcagtaagttggcagcatcacccatagtaacatcctgtctgcttttgagtagcccaaagataaagtatcccgcttaacttaaagagtctgtttcaggacatgaaatatccaatccgggcagacgggtaatgattctgctcatcaccacacctgccagcaatgcaggaatgatgcggacaacgagactgtcaccagaaagaatgttttcaaacaactccgaggaagccatgcccttaatatgtacaataactgcacaatagatctcggtgataacgacgccacctatgccaccagccagacaacgataatttttctgtgacccgatcttttccggcagacaggcgaccatcacgccggttaacaatgcaggaatagctcccgtagtaatcgacaataagagaaacaatggaagtacctgtattattaccaaaagaaccagcggttcttttgcgaagaatatgtagaggacaagaaacagaacaccaattaacggtcctaaaaccgcaaaataaagtccgtgatgtattacccgacgtgaaacagacatatcaaactccctttacttacctttgagcgccaatttaagcggggtaagtgaagggagtgtgaagaactatgccgtaatatcccaaccacgcgctttccacagttccggtaactgcgaaagatgggtaaaggtggtgactttcgggtgaacgatcggcttattgtgcgggtcggcgcagaagtagaacacttccatacctgcgtcgataccagattgcgcaccggcaactgagtcatcaaccagaatgcagttttctacatttacattcatcgcttttgccgcatggaacattaacgccgggtctggcttccagcgctgaatatcgtagccgctgaacagtttatccgggaagtagtgcaacatattcagcttgcccatagaatgctgcattttgttatttgggccgttagataccacacacattggcgcagtgatcgctgacaggagcgcttcagccccttcgatggcttccagttctgaatcgaacagccgagcgacttctgcacggtaaacgtgttcagattctgttttcgctaacgtaacaccatgttcaagggaaacaatatcgataatttcgtacagttttacacctttgaaacgtttgaatacctcttcaggatcgagcgtaataccaaattcctgaaacatcgttacatatgcgcgggagcaaatgacttcactgtcgaccagcgtaccgtcgcagtcgaaaaataccgcttctatccgggacatgcctttcctttttaatcagtttaacgttttcgtagagccgatttgcgcaacgcaatcgttgccgtataagtaaatccaataaaaaaagtctctcacaaacgcgcctattgtcgcattttggtatacgatagcgacggattttccctccttgttcggaaatagataatgagtcatcaacataccacccagacttctggtcaggggatgctggaacgagtttttaaactgcgcgaacatggtactacggcacgaactgaagtgattgccgggttcaccaccttcctgacgatggtctacatcgtatttgttaacccacaaattctgggcgttgctggcatggacaccagtgccgtcttcgtaacaacctgtctgattgctgctttcggtagcattatgatgggattgtttgcaaaccttccggtggcgctggctcctgcgatggggcttaacgcctttttcgcttttgtggttgtccaggcaatggggctgccgtggcagatcggtatgggcgcaatcttctggggcgctgtcggactgcttcttttgaccattttccgcgttcgttactggatgattgctaacattccggtaagtctgcgtgtgggtattaccagcggtatcggtctgttcattggcatgatggggctgaaaaacgcaggtgtgattgtcgctaacccggaaacgctggtgagcatcggtaatctgacttctcacagcgtgctgctggggatcctcggtttcttcatcatcgccattctggcctcgcgcaacattcacgcagcggtgctggtttctatcgtggtgacgacgctgctgggctggatgctgggtgatgtgcactacaatggcatcgtttctgcgccgccgagcgtaatgacagttgtgggtcatgtagatttagccgggtcgtttaacctcgggctggcaggggtgattttctctttcatgttggtcaacttgtttaactcctccggtacgctgattggcgtgaccgataaagcaggtctggcggatgagaaggggaaattcccgcgcatgaagcaggcgctgtatgtcgacagtatctcttccgtgaccggttcgtttatcggtacttcttccgttacggcttatattgagtcctcttccggcgtatcggttggcggtcgtaccggtctgacggcagtggttgttggtctgctgttcctgctggttatctttctgtcgccgctggcgggaatggtgccaggctacgctgcagctggcgcgttgatctacgttggcgtgttgatgacctcaagtcttgctcgcgtgaactggcaggatcttactgaatctgttccggcgtttattaccgccgtgatgatgccgttcagcttttcgattaccgaaggtattgcgctgggctttatctcctactgcgtgatgaagattggtaccgggcgtctgcgtgaccttagcccgtgcgtaatcatcgttgcgctgctgtttatcctgaagattgtatttatcgacgctcattaaaatcgatagcgcattaaaaacccgccatgcatgattactggcgggttttttatttagatcttaactcgctgaataaactcaccaaatgcggtcaattgcccggtcaggtggtccagcgtaccctgatcaatcacttctccggtttgccgatcaactttgttctgaatcacgccgcccataaattccggcttgttcatcaccattgcatcgaggaaaaccagaatctggcgcaggtgatactgacagcgcgcgccgccaatcacgcccattgagctggtctgaatcaacaccggtttaccggccagcggttgatccggcaggcgggaaagccagtcgatggcatttttcagcccacccggtaccgagtagttatattccggcgtgacgatcaccacaccgtcagcctgacggatctgttccgccagagcttcaaccgttgctggaaaaccttcttcctgctgtacgtcagcgtcatacaggggaatgtcggcaatggaaggtaacgcattgacttccatgctcgccggagcaattttcggcagggtacgtgcaaccatgccattaaatgagcctttgcgcaggctccccagtaacgtaaccacctgcaatttttcagacataatgactcctgtggttgtctatcaatttggcgaaaaagacttcacggtagagagctgggcaaaacgcatcatccggctggtaggattgttggcgcggctgtgaatatccggcaggcttttccagctgtgtttgccatctaactcccagacactgagcttttcaatcgcgggcgtgaccgccacggaccacaccagcacgtcctccgcgtcgcataacgcttctacatgatttacatgagcacatttcaggcgtccggcaatgggcagcagctgcagatcgcgcggatcgtcattcaaaacatcaccggttagttttagcacgcttcggcgcagcgtgatgagctgcgcccgcgcttcgttaggatcgttttgtttactgatccatagcgattcattgctggaaaaggtgtggttatcgggcgcgtgtgggctatgaaacccgcgcgtcgcacgctgtagttccatatcgaggccacattcaccttcggttgttaacgccacgccaaccatattcccggcataggaaatagaaaacgaaggcaaatttttatcactgaaaaccggtttacctttcggcagggtgacgatttccggcaattcgccaatgccatacagcatgaacatcagttctgcgagtaaacctctggacgccagaaaacggctttgacgatgagggggaatgtttcgggcttcttgatgacactgggaggggagacgaacagaaatcagatgtccttccgttaaaatccctcgggcaaagtgagtcgccatttttcgctccatgcttaatggtccattatgaatacaagagtaatcatttactggaatgatggacagactaaagcggctaaaagttcgattcagacaagcttgttacaacttttttacattttattgtgaaattgggtcgcgtttcatacgattcggttatgccatcgacgcgtaaaggtttttaatggtttcccgtaaccagacgatcttcggattatggctgttccgtttatgccacagcagggtaaaaggaacttccagctttttttgctggctttcgtcaaacgggagaggaagagcaaccaacggcagttgatggagttgattgtagtactgacagtagcgcggcgcggtcgccagtagcagattgtcgggttgcgctgccataaacagtgactgctcgaattccggcagactcatagcaatcgtgcgttcgcgccccagctcctgtaacacattgtccagcgcccaggtgtcgctctgttcccagcaaatgctgatatgcggataacgtaaaaaggtgtccagattccacgtttcatgcagtgccggatgatctttgcgtaaccagacgcagggtacatcactaaacagcacttcataatcaatggctaacggtagcgagcttaacagctcccgcgagcgaggatggctttcgcgaccggaaaaaccaatatccacttcaccacgagtaatggcatctaaggaatcgtaatcccagttacgtagtttgatggtcgcctgcgggtaacgttggtagatccgtttcgacagcgcattaagcatgatcatcatcagcggcgattccgccgccaactcaaacttcaggccgcgcggtgtctggtggtgcggtttatccagcagcagattgctcatttgcatccattccgccagattttgctccatgctgaccattagcggtgtgggcgacaggcccagcggtgagttcacaaagagcgggtcgtcaaaccacgctcttaactttgccagcgacttactcaccgctgaaggggtcacgttcatccgcttcgccgctttggtcacgctgcgctcctgcatcagcagttgcagacagagcagcagattgagatcaagcgtggtgatggatttcttcatgagcggcaacggggcgtccaggcgcgacgaacataatcagcaacaggctcactatactacaggcaatcagaatcccgatcagcatattccatgcgccaataccaaccaccgctgccagccaaatccacagtgacgaaccgcaaacctgcgcaatacctaaggtcgagctggctacgcccgcgcgtaatgaaaatggtcctaacgcctgactcatcgctacgccaaaacctaccgagaaaccggcgcaaatcagcgtgataccaaacagagaaaccgcatgggaaggtgaaacggcaagggtgatccccgccgcaaggaataacacctgcgaggtgatcatcaacgtacgtggcttaaaaattcccagcgcaaatggcgtggagaatgaaacggtcatgctgacgccagcggtcaacgccataatggtggcgtattctccgcgctcaaaacccatgatttccatcagcaataccggcgatgtattgacgaaagtgaggatcaccgaaacgctgagggtggtgataacaacacggctgaggaaaaaccgattaagcagcgactcgctattttctcgtggtttgtccgaagcagcgggggacgctgggcgcgtttcttttaaaataaacaaagacaacatcagtaccgcgatgcccatcattgccatcgcccagaacagactctgccacgggaatttaagcataatcagatgtccgagcactggcgctaacaccggaatgatgcaggtaataccgttgagtaatgacagcactttagcccgacgtcgatcatccagcgtgtcgcgcaaaatggcgaacgccactacgtaacaacagcctgcgcccaacccctgtagaaatcggcctgcaagaaataacgtgctggtttcagccagtgaacagaacaccgaggcaataataaatagcgccgcgccgggtatggcgaccggctttctccctgaacgatcagccactttaccggcaaataacatcgcagctgccatccccgccagatatacggagaacgcaatatgcaactgcgcttcgctggcattgagatcggcggcgatgcgcggtaaaccaacgaggtacatatcaatcccggcgggataaagtaaaaccagggcaaaactacaaatcaaaaagcgggacatgggctaaagcgtcctgatagtaaggtgacgcaaagcatacgtggtgaaggaggatcaggcgagttgccatttggacataagtgatttcctgagaggcaagaagccagcgaatggctggcttcttgaaggatttagccaaatttagggtgatgctgccaacttactgatttagtgtatgatggtgtttttgaggtgctccagtggcttctgtttctatcagctgtccctcctgttcagctactgacggggtggtgcgtaacggcaaaagcactgccggacatcagcgctatctctgctctcactgccgtaaaacatggcaactgcagttcacttacaccgcttctcaacccggtacgcaccagaaaatcattgatatggccatgaatggcgttggatgccgggcaactgcacgcattatgggcgttggcctcaacacgattttacgtcacttaaaaaactcaggccgcagtcggtaacctcgcgcatacagccgggcagtgacgtcatcgtctgcgcggaaatggacgaacagtggggctatgtcggggctaaatcgcgccagcgctggctgttttacgcgtatgacagtctccggaagacggttgttgcgcacgtattcggtgaacgcactatggcgacgctggggcgtcttatgagcctgctgtcaccctttgacgtggtgatatggatgacggatggctggccgctgtatgaatcccgcctgaagggaaagctgcacgtaatcagcaagcgatatacgcagcgaattgagcggcataacctgaatctgaggcagcacctggcacggctgggacggaagtcgctgtcgttctcaaaatcggtggagctgcatgacaaagtcatcgggcattatctgaacataaaacactatcaataagttggagtcattacccgttcggggagcaatattaaatgctttttttaaagattataaattacgtaagaattttaatgtttaaaaaaagggttgaggaataacaggagtgctaacaatgaagcgaagccgcatctgacagtcagaatacggcttcgtaagcgcggttacttaccaatacagaagctggagaaaatccgccccagcaaatcatcagaggtaaattccccggtgatttcgcttaagttctgctgtgccaggcgcaactcttccgccagcagttcacccgcccaggcacctaacagttgcgctttaccttgctgcaaatgctccgctgcctgttccagcgcctgtaggtggcgacgacgcgccaggaagccgccttccatgttggtgtcaaagcccatgctctgtttgagatggttacgcagcacctccacgccttcacctgtccttgccgagagacgaattaacgcgtgaccgttcacttcactcattcccagcgtttcgccggtgatatcggctttattgcgcaccacggtgatcggtagtttcgctggcagacgggcgataaattccggccagatctctgccggatccacggcgtctgttgtggtgccatcgaccataaacagcacgcggtcggcctgttcaatttcctgccacgcgcgctcgataccaatacgttccacttcgtcactggcttcacgtagcccagcggtatcgatgatatgcagcggcattccgtcaatgtggatatgctcacgcagcacgtcacgtgtggttccggcgatatcagttacgattgctgcttcacggcccgccagcgcgtttaacaggctcgatttaccggcgttaggacgtccggcaatcaccaccttcatcccttcgcgcaacaaactaccctgacgtgcttcagcacgcactgcatcgagatcggcaatcacgtcattaagctgggcttcaattttgccgtcggagaggaaatcgatctcttcatcagggaaatcaattgccgcttcgacgtaaatgcgcaagtgggtgagggcttccaccagatggttgacccgtgcggagaatgcgccttgcagcgagttaagtgccgaacgggccgcctgttccgaactggcgtcgataagatcggcaatcgcctcggcctgggctaagtcgagtttatcgttaagaaacgcgcgttcggaaaactcaccagggcgagcaatccgcaggccgggaatggtcagaatgcgttttaacagcaggtcgaggatcaccggaccgccatgaccctgcagttccagcacatcttcgccggtgaacgagttcgggccagggaaccatagcgcaatcccctgatcgagcacgccgccgtcggcgtctttaaacggaagataatcggcgtagcgcggcttaggcagtttacccagcacggtttcggcaacttcacgggcttttaggccggagatgcgcaggatgccaacgccgccacgtcccggaggcgtggcctgggctacgatagtgtcattatcgctcatgatgttcctgttgctttgtgtggcggatgcgcggtgcttatccaccctacgaaaagaaaaaaggcggtcaactgaccgcccttattttagcgaaaactcaccgaatcaggattttttcttctcgcggctatgcaggccacgtttttccagaccacggtaaatcagctgctgctgaataatggttaccaggttgctgacgatatagtacagcaccagacctgacgggaaccacaggaagaacacggtgaagatgaccggcataaaggtcatgatcttctgctgcatcgggtcggtcactgtggtcggcgacatcttctgaatgaagaacatcgttacgcccatcaggatcggcaggatgtagtacgggtcctgtgccgacaggtcgtggatccacagtgcaaacggtgcctgacgcagttcaacggaacccatcagcatgtagtacaacgccaggaagattggcatctggatcagcagcgggaagcagccgcccagcgggttaaccttctcagctttgtacagcgccatcatttcctggctgatacgctgtttgtcatcgcccagacgctcacgcattgcctgaatcttcggctgcagcatacgcatcttcgccatggaggtgtactgcgctttggtcagcgggtacatgatgccacgaacgataaaggtgatgatgataatggagaagccccagttacccacaaagctatggatccatttcagcagtttgaacagcggctgagagatgaaccacaaccaaccgtaatcaacggtcagatccaggtgcggagcaacagctgccattttgtcctggatttccgggccaacccacagggtgctgttcatcgcgccagtctgaccaggctgaaccagtaccggctgagatttatagccgatagcggcgatgccgttacccagattagcggtatagaagttgttggtaccgtcgttatgcgggatccacgccgtcgcgaaatactgttgcagcattgccacccaaccacctttcgaagagatgttcaggttttcgttatcggcaatggtatcgaacttgtatttctcgtacttctcgtcaggcgtggagtacgccgcgccgcggaaggtgtgcagtgcgaagttgctgcttccggtatcgagatgcggtggcagagtgatggattgcttcaactgaccaaaggtggagatttccagcggtttctcgccagcgttctgcacgttgtagttgacgttgacagcgtaatcaccacgtttcaggacaaacgttttggtaaacgtgttgcctgccgcgtcggtatacgtcatcggcacctgcagttcgttttgaccttcagccagcacataagcgtctttttcaacgttatacagcggacgcgggccgttagccgggttatccgggccatcacgaccggtcagaccgctctgtgcctgataaataaactgcggtgaagtttccagcagctggaacggctgggtagagttcagctctttcgggtaagcaggcagcagagcttgctcaacatcaccaccacgggtgttgatggtcagatcaagcacgtcggtcttaaccgagatcagtttcccctggccactggccggtacgccctggtcggcggcgctacccgctgcggtggtcgttgtctgcgtggtctgttgggcctgaggttgcgggtttttatcctgctcccaggcttgccagatcatgaaagacacgaacagcaaagcgatgactaaaagattgcgttgcgaatccatcgttagtgttctctggtatcaaatggtccgggcgggacgggatcgtcaccaccagggtgtaaagggtggcattttaatacgcgtttcaccgtcaaccaactgccttttatcactccaaacctgcgcaatgcctcaattccgtagcttgaacaggttggagtgaaacgacaatgcggcccgagtagcggactaatcaggcgttgatagacccgaatgagggctatcaggacccgcgagccaggcgacagtggcggcgccataatttttccaacgcttccgagagagcacggttatcgaggtcggcaaccccttttttcgccaccaccacgaaatccatagccgggagttcatgttggcgcagacggaagctttcacgcgtcagacgtttaatccgattgcgttcatgggcgcgtcgaacgtttttcttggcgactgtaagaccgatacggggatgccccagcgaattcaggcggccgagaatggtaatttgcggcgtgccagcccgttgtggctgctggaagacgaatgtgaattgactgggagttaacaagcgtaactccctgggaaatgcgagcttaaccactcaggggttagctttattacttagaaacggtcagacgagcgcggcctttagcacgacgacgtgccagaacctgacgaccatttttagtagccatacgagcacggaagccgtgagaacggttgcgcttcagtacagacggttgaaaagtgcgtttcatggcgatttctacctaaacttgaataaattcaatggctttattggatatccgccgaaaaatgaaacgatggacaccgaagccatgggtgattaaagaggccggattgtaataattgtacactccggagtcaattctctttccttatttaccgcgcttttccgcaccttttcgcagggaaaatgtacgacctcacaccagtgaaaaccagcatggcgcgccgggtggaggattatacgggctgatgggtaaagcgcaaggatcgtcctagatctttattagatcgattaagccaatttttgtctatggtcattaaattttccaatatgcggcgtaaatcgtgcccgcctcgcggcaggatcgtttacacttagcgaggtctggaaagtcctgtggataaatcgggaaaatctgtgagaaacagaagatctcttgcgcagtttaggctatgatccgcggtcccgatcgttttgcaggatcttgatcgggcatataaccgcagacagcggttcgtgcgtcaccctcaagcagggtcttttcgacgtacgtcaacaatcatgaatgtttcagccttagtcattatcgacttttgttcgagtggagtccgccgtgtcactttcgctttggcagcagtgtcttgcccgattgcaggatgagttaccagccacagaattcagtatgtggatacgcccattgcaggcggaactgagcgataacacgctggccctgtacgcgccaaaccgttttgtcctcgattgggtacgggacaagtaccttaataatatcaatggactgctaaccagtttctgcggagcggatgccccacagctgcgttttgaagtcggcaccaaaccggtgacgcaaacgccacaagcggcagtgacgagcaacgtcgcggcccctgcacaggtggcgcaaacgcagccgcaacgtgctgcgccttctacgcgctcaggttgggataacgtcccggccccggcagaaccgacctatcgttctaacgtaaacgtcaaacacacgtttgataacttcgttgaaggtaaatctaaccaactggcgcgcgcggcggctcgccaggtggcggataaccctggcggtgcctataacccattgttcctttatggcggcacgggtctgggtaaaactcacctgctgcatgcggtgggtaacggcattatggcgcgcaagccgaatgccaaagtggtttatatgcactccgagcgctttgttcaggacatggttaaagccctgcaaaacaacgcgatcgaagagtttaaacgctactaccgttccgtagatgcactgctgatcgacgatattcagttttttgctaataaagaacgatctcaggaagagtttttccacaccttcaacgccctgctggaaggtaatcaacagatcattctcacctcggatcgctatccgaaagagatcaacggcgttgaggatcgtttgaaatcccgcttcggttggggactgactgtggcgatcgaaccgccagagctggaaacccgcgtggcgatcctgatgaaaaaggccgacgaaaatgacattcgtttgccaggcgaagtggcgttctttatcgccaagcgtctacgatctaacgtacgtgagctggaaggggcgctgaaccgcgttattgctaacgccaactttaccggacgggcgatcaccatcgacttcgtgcgtgaggcactgcgcgacttgctggcattgcaggaaaaactggtcaccatcgacaatattcagaagacggtggcggagtactacaagatcaaagtcgcggatctcctttccaagcgtcgatcccgctcggtggcgcgtccgcgccagatggcgatggcgctggcgaaagagctgactaaccacagtctgccggagattggcgatgcgtttggtggtcgtgaccacacgacggtgcttcatgcctgccgtaagatcgagcagttgcgtgaagagagccacgatatcaaagaagatttttcaaatttaatcagaacattgtcatcgtaaacctatgaaatttaccgtagaacgtgagcatttattaaaaccgctacaacaggtgagcgggccgttaggtggtcgtcctacgctaccgattctcggtaatctgctgttacaggttgctgacggtacgttgtcgctgaccggtactgatctcgagatggaaatggtggcacgcgttgcgctggttcagccacacgagccaggagcgacgaccgttccggcgcgcaaattctttgatatctgccgtggtctgcctgaaggcgcggaaattgccgtacagctggaaggtgaacggatgctggtgcgctccgggcgtagccgtttttcgctgtctaccctgccagcggcggatttcccgaacctcgatgactggcagagcgaagtcgaatttaccctgccgcaggcgacgatgaagcgtctgattgaagcgacccagttttctatggcgcatcaggacgttcgctattacttaaacggtatgctgtttgaaaccgaaggcgaagaactgcgcaccgtggcgaccgacggccaccgtctggcagtctgttcaatgccaattggtcaatctttgccaagccattcggtgatcgtgccgcgtaaaggcgtgattgaactgatgcgtatgctcgacggcggcgacaatccgctgcgcgtacagattggcagcaacaacattcgcgcccacgttggcgactttatcttcacctccaaactggtggatggtcgcttcccggattatcgccgcgttctgccgaagaacccggacaaacatctggaagctggctgcgatctgctcaagcaggcgtttgctcgcgcggcgattctctctaacgagaaattccgcggcgtacgtctttatgtcagcgaaaaccagctgaaaatcaccgccaacaacccggaacaggaagaagcggaagagatcctcgacgttacctatagcggtgcggagatggaaatcggcttcaacgtcagctacgtgctggatgttctgaacgcgctgaaatgtgaaaacgtccgcatgatgctgaccgattcggtttccagcgtgcagattgaagatgccgcatcacagtcggctgcctatgttgtcatgccaatgagactgtaatgtccctcacccgcttgttgatccgcgatttccgcaacattgaaaccgcggatctcgctttatctcccggctttaactttctggtaggtgccaacggcagtggcaaaaccagcgtgctggaagccatctatacgctcggccatggtcgggcgtttcgcagtttgcagattggtcgcgtcattcgccatgagcaggaggcgtttgttctccacgggcgattacagggcgaagagcgcgagacagcgattggcttaaccaaagacaaacagggcgacagcaaagtccgcatcgacggtacagacgggcataaggtcgcggaactggcgcacctgatgccaatgcagttgataacgccagaagggtttactttactcaacggcggccccaaatacagaagagcattcctcgactggggatgctttcacaacgaacccggatttttcaccgcctggagcaatctcaagcgattgctcaagcagcgcaatgcggcgctgcgccaggtgacacgttacgaacagctacgcccgtgggataaagagctgatcccgctggcggagcaaatcagcacctggcgcgcggagtatagcgccggtatcgcggctgatatggccgatacttgtaagcaatttctccctgagttttctctgactttctctttccagcgcggctgggagaaagagacagaatatgctgaggtgctggaacgtaattttgaacgcgatcgccagctaacctacaccgcgcatggcccgcataaagcggacttacgcattcgcgccgacggtgcgccggtggaagataccttatcgcgtgggcagcttaagctgttgatgtgcgccttacgtctggcgcaaggagagttcctcacccgtgaaagcgggcggcggtgtctctacctgatagatgattttgcctctgagcttgatgatgagcgtcgcgggctgcttgccagccgcttaaaagcgacgcaatcacaggtctttgtcagcgcgatcagtgctgaacacgttatagacatgtcggacgaaaattcgaagatgtttaccgtggaaaagggtaaaataacggattaacccaagtataaatgagcgagaaacgttgatgtcgaattcttatgactcctccagtatcaaagtcctgaaagggctggatgcggtgcgtaagcgcccgggtatgtatatcggcgacacggatgacggcaccggtctgcaccacatggtattcgaggtggtagataacgctatcgacgaagcgctcgcgggtcactgtaaagaaattatcgtcaccattcacgccgataactctgtctctgtacaggatgacgggcgcggcattccgaccggtattcacccggaagagggcgtatcggcggcggaagtgatcatgaccgttctgcacgcaggcggtaaatttgacgataactcctataaagtgtccggcggtctgcacggcgttggtgtttcggtagtaaacgccctgtcgcaaaaactggagctggttatccagcgcgagggtaaaattcaccgtcagatctacgaacacggtgtaccgcaggcaccgttggcggttaccggcgagactgaaaaaaccggcaccatggtgcgtttctggcccagcctcgaaaccttcaccaatgtgaccgagttcgaatatgaaattctggcgaaacgtctgcgtgagttgtcgttcctcaactccggcgtttccattcgtctgcgcgacaagcgcgacggcaaagaagaccacttccactatgaaggcggcatcaaggcgttcgttgaatatctgaacaagaacaaaacgccgatccacccgaatatcttctacttctccactgaaaaagacggtattggcgtcgaagtggcgttgcagtggaacgatggcttccaggaaaacatctactgctttaccaacaacattccgcagcgtgacggcggtactcacctggcaggcttccgtgcggcgatgacccgtaccctgaacgcctacatggacaaagaaggctacagcaaaaaagccaaagttagcgccaccggtgacgatgcgcgtgaaggcctgattgcggtcgtttccgtgaaagtgccggacccgaaattctcctcccagaccaaagacaaactggtttcttctgaggtgaaatcagcggttgaacagcagatgaacgaactgctggcagaatacctgctggaaaacccaaccgacgcgaaaatcgtggttggcaaaattatcgatgctgcccgtgcccgtgaagcggcgcgtcgcgcgcgtgaaatgacccgccgtaaaggtgcgctcgacttagcgggcctgccgggcaaactggcagactgccaggaacgcgatccggcgctttccgaactgtacctggtggaaggggactccgcgggcggctctgcgaagcaggggcgtaaccgcaagaaccaggcgattctgccgctgaagggtaaaatcctcaacgttgagaaagcgcgcttcgataagatgctctcttctcaggaagtggcgacgcttatcaccgcgcttggctgtggtatcggtcgtgacgagtacaacccggacaaactgcgttatcacagcatcatcatcatgaccgatgcggacgtcgacggctcgcacattcgtacgctgctgttgaccttcttctatcgtcagatgccggaaatcgttgaacgcggtcacgtctacatcgctcagccgccgctgtacaaagtgaagaaaggcaagcaggaacagtacattaaagacgacgaagcgatggatcagtaccagatctctatcgcgctggatggcgcaacgctgcacaccaacgccagcgcaccggcattggctggcgaagcgttagagaaattggtgtctgagtacaacgcgacgcagaaaatgatcaaccgcatggagcgtcgttatccgaaagcaatgctgaaagagcttatctatcagccgacgctgacggaagccgacctctctgatgagcagaccgttacccgctgggtgaacgcgctggtcagcgaactgaacgacaaagaacagcacggcagccagtggaagtttgatgtccacaccaatgccgaacaaaacctgtttgaaccgattgttcgcgtgcgtacccacggtgtggatactgactatccgctggatcacgagtttatcaccggtggcgaatatcgtcgtatctgcacgctgggtgagaaactgcgtggcttgctggaagaagatgcgtttatcgaacgtggcgagcgtcgtcagccggtagccagcttcgagcaggcgctggactggctggtgaaagagtcccgtcgcggcctctccatccagcgttataaaggtctgggcgagatgaacccggaacagctgtgggaaaccaccatggacccggaaagccgtcgtatgctgcgcgttaccgttaaagatgcgattgctgccgaccagttgttcaccacgctgatgggcgacgccgttgaaccgcgccgtgcgtttattgaagagaacgccctgaaagcggcgaatatcgatatttaatggcgctaaccatgcgagcgtgcctgatgcgctacgcttatcaggcctacgaaaatcttgcaatgtattgaattttcatgattttgtaggccggataaggcgttcacgccgcatccggcaagaagctataagaaaagggcggagatcatctccgccctttttatttctgcaatccgcaattatcatcccgcaaatctatactttttgggtcaacacgtaacgctttacaggtgattatcatggggctttttgatgaagttgtcggtgcctttctgaaaggcgatgcggggaaatatcaggctattttaagttgggttgaggagcagggcggcattcaggtgctgctggaaaaactgcaaagtggcggcttaggggccattctctcaacctggctgagtaatcaacagggcaatcaatcggttagtggcgagcaactggaatcggcgctcggcacaaatgcggtgtccgatctcgggcaaaaacttggcgtggataccagtacagcttccagtttactggcagagcaattgccgaagattattgatgcgctctcaccgcaaggtgaagtgtcaccacaagccaataacgatctgctttccgcaggtatggaactgctgaaagggaaactcttccgctaagcaaatggggagcatgcaacccgcgttgcatcccccttttccctcgggtgttgtactgatttttgagcggaatcgcgttagcatgggtcaggaaccaatctacctggggaactcatggctatcaaactcattgctatcgatatggatggcacccttctgctgcccgatcacaccatttcacccgccgttaaaaatgcgattgccgcagctcgcgcccgtggcgtgaatgtcgtgctaacgacgggtcgcccgtatgcaggtgtgcacaactacctgaaagagctgcatatggaacagccgggcgactactgcattacttataacggcgcgctagtacagaaggccgctgatggtagcaccgtggcgcaaactgctctcagctatgacgactatcgtttcctggaaaaactctctcgcgaagtcggttctcatttccacgccctggaccgcaccacgctgtacaccgccaaccgcgatatcagctactacacagtgcatgaatctttcgttgccactattccgctggtgttctgcgaagcggagaaaatggaccccaatacccagttcctgaaagtgatgatgattgatgaacccgccatcctcgaccaggctatcgcgcgtattccgcaggaagtgaaagagaaatataccgtgctgaaaagtgcgccgtacttcctcgaaatcctcgataaacgcgttaacaaaggtacgggtgtgaaatcactggccgacgtgttaggtattaaaccggaagaaatcatggcgattggcgatcaggaaaacgacatcgcaatgattgaatatgcaggcgtcggtgtggcgatggataacgctattccttcggtgaaagaagtggcgaactttgtcaccaaatctaaccttgaagatggcgtggcgtttgctattgagaagtatgtgctgaattaatctgtgggcgggcaaacagcataaacgcgtttgcccgcttactgattattggtttactgcatatacaaccagaaattgcagcggtgcagtaatgatgtccagcgtaacagtcactggcagtaatgctgcggaaacaccatccggaatgcctctgggtgaatggtattcataaaatcgcactttaaatggatggtagaaagccattacgtttgagtaatccatgtttttatttttctcatggatagtaccttccaggttttctactgtccgggtacagtgctgaacaccacaagcaaaacgatattgtgtcactcgtgctttttcttcttctgtgctccagttgtaatagagtgatattgtgccggtaaatttctttttccccgcatttaaaacaaatcttgcgtcatcagcaacctgaatattgtgccggttaagagctggatccttgagcatcttaacgatgtcatcggcaccatctgtgataaggtaatccagcgattcccctacaaaaacatagccttttgttccattactatcctttgcctgcgatagccccgtgatggtgtctgactgcgattgatactttcctgaactaccctttgcggtatgggaaaccagggcatacgagatacagcccgaaagcatcagcgccagtgggaataaaccggcagtcttaaaaaatcccttaagattcaacttcatgattaatcctttaaacgagtagctaagccgttgaaagcatactcttctttccctcctgtttagcgcctgatatcccttttcagatttctgcccgacgcatgtcatttttttacgcattgttctttttgtgatctaaattgtagtacaacaatataagtttgtactacattacacgcacagcaaacgcgaacgtcatcacgctggtactacaaagttgccgtgttatgcatcgatcggggtaaagtagagaagaacatacagagcacaaggactctccatgactctcaataaaaccgatcgcatcgtcattacgctgggtaaacagatcgttcacggcaaatacgtaccaggctcgccgcttccggctgaggcggaactctgtgaggagtttgcaacctcgcgcaacatcatccgtgaggtgttccgttcgttgatggcgaaacggctgattgaaatgaaacgttatcgcggcgcgtttgtggcaccgcgtaaccagtggaattacctcgacactgacgtactgcaatgggtgctggaaaacgactacgacccacggcttatcagtgccatgagcgaagtgcgaaatctggtggaaccggcgattgcccgttgggcagcagagcgcgcgacctccagcgatctggcgcagattgaatcggcgctgaacgagatgattgccaacaatcaggaccgcgaagcgtttaacgaagcggatattcgctaccacgaggcggtgctgcagtcggtgcataacccggtgttacagcaacttagcattgcgatcagttcgctgcagcgggcggtttttgaacgaacctggatgggcgatgaggccaacatgccgcaaacgctccaggaacataaggcgctgttcgatgcgatacggcatcaggacggcgatgcggcagagcaggcggcgcttaccatgatcgccagctcgacacgaaggttaaaggaaatcacatgacagctcgctacatcgcaattgactggggatcgaccaatctgcgcgcctggctttatcagggcgaccactgcctggagagcaggcaatcagaagcaggcgtcacgcgcctgaacggaaaatctccggctgcggtgttagcagaagtcacgaccgactggcgtgaagagaatacgccagtggtaatggcaggaatggtcggcagcaatgtcggctggaaagttgctccgtatttatctgttcctgcccgtttttcgtctattggcgaacaattaacgtctgttggcgacaatatctggattattcccggattatgcgtctctcatgatgataaccacaatgtgatgcgcggcgaagaaactcaattgatcggcgcgcgagctctggctccttcctctctttatgtcatgcccggtacgcattgcaaatgggtgcaggccgatagccagcaaatcaacgattttcgcaccgtgatgaccggtgaattacatcatttactgttaaatcactcattgattggtgcaggtttgccgccgcaggaaaactctgccgatgccttcacggctggccttgagcgtggtcttaatacgcccgccatattgccgcagctttttgaagttcgtgcctcgcatgtgctgggaacacttccccgtgaacaggtcagtgaatttctctctggtttgttgattggcgcagaggtcgccagtatgcgcgactatgtggcccatcaacacgccatcacccttgtcgccggaacatcgttgaccgcgcgctaccagcaagcctttcaggcgatgggttgcgacgtgacggcggtggcgggcgacacggcatttcaggctggtataaggagcatcgctcatgcagtggcaaactaaacttccgctgatcgccattttgcgcggcattaagcccgacgaggcgctggcgcatgttggcgcggtgattgacgccgggttcgacgcggttgaaatcccgctgaattccccacaatgggagcaaagcattcccgccatcgttgatgcgtatggcgacaaggcgttgattggcgcaggtacggtactgaaacctgaacaggtcgatgcgctcgccaggatgggctgtcagctcatcgttacgcccaatatccatagtgaagtgatccgccgtgcggtgggctacggcatgaccgtctgccccggctgcgcgacggcgaccgaagcctttaccgcgctcgaagcgggcgcgcaggcgctgaaaatatttccgtcatcggcttttggtccgcaatacatcaaagcgttaaaagcggtattgccatcggacatcgcagtctttgccgttggcggcgtgacgccagaaaacctggcgcagtggatagacgcaggttgtgctggggcgggcttaggcagcgatctctatcgcgccgggcagtccgtagaacgcaccgcgcagcaggcagcagcatttgttaaggcgtatcgagaggcagtgcaatgaaaatcaccaaaattaccacgtatcgtttacctccccgctggatgttcctgaaaattgaaaccgatgaaggcgtcgtcggctggggcgagccagtgattgaaggccgcgcccgcacggtggaagcggcagttcacgagctgggtgactatttgattggtcaggatccatagcgcatcaatgacttatggcaagtgatgtatcgcgccggattttatcgtggcggtccaatcctgatgagcgccattgccgggatcgaccaggcgttatgggatatcaaaggtaaagtgctgaatgcgtcggtctggcaactgatgggcggcctggttcgcgacaaaattaaagcctacagttgggtcggcggcgatcgtccggcggatgtgatcgacggtattaaaaccctgcgcgaaatcggcttcgataccttcaaactgaacggttgtgaagaactggggctaattgataactcccgcgcggtagatgcggcagtcaacaccgtggcacaaattcgtgaagcttttggcaatcagattgagtttggtcttgatttccacggtcgcgtcagcgcgccaatggcgaaagtgctgattaaagaactggagccgtatcgcccgctgtttattgaagagccggtgctggcggaacaagccgaatactacccgaaattggcggcacaaacgcatattccactggcggcgggtgagcgcatgttctcacgtttcgattttaaacgcgtgctggaggcaggcggtatttcgattctacaaccggatctctcccatgcaggcggtattaccgaatgctacaaaattgccggaatggcagaagcctatgacgtgacccttgcgccgcactgtccgctcggaccgattgcactggcggcttgtctgcatatcgactttgtttcctataacgcggtacttcaggaacaaagtatgggaattcattacaacaaaggcgcggagttactcgactttgtgaaaaacaaagaagacttcagcatggttggcggcttctttaaaccgctaacgaaaccgggcttaggcgtggaaatcgacgaagctaaagttattgagttcagtaaaaatgccccggactggcgtaatccactctggcgtcatgaagataacagcgtagcagagtggtaattcctgccacgtaagcccctcatcgggcactaaaacagcaatacaaaaatataaccctctgtaaattacagggcatggtgagcggcttcgctatgcccaaaatctggagaaagctcgctatggatattcccgttaatgcagcaaagccggggcgtcggcgttatctgacgctggtgatgatctttattacggtggtcatttgttatgttgaccgcgctaacctggccgtggcttccgcccatattcaggaagagttcggcattacgaaagcggaaatgggctatgtattttcggccttcgcctggctttatacgctatgccagatccccggcggttggtttttagatcgcgtaggttctcgcgtgacttattttattgcgatatttggctggtcagtggcgactttattccagggctttgccacgggattaatgtcattaattggtctgcgtgcgataaccggtattttcgaagcgcccgctttcccgaccaataaccggatggtgaccagctggttcccggaacatgaacgcgcttccgccgttggtttttatacgtctggtcagtttgtcggtctggcgtttttgactccgctgctgatctggattcaggagatgttgagctggcactgggtgttcattgtgactggtggtatcggcattatctggtcgctgatttggtttaaggtttatcagccgccgcgcctgaccaaaggcatcagcaaagctgaactggattacattcgtgatggcggcggtctggtggatggtgatgcgccagtgaagaaagaggcacgtcagccgttaacagccaaagactggaaactggtgttccatcgtaaactgatcggcgtctatcttgggcaatttgcggtggcttctacactgtggtttttcttaacctggttcccgaactatttaacccaggaaaaaggaatcacggcgctgaaagcaggctttatgaccacggtgccattcctcgcggcgtttgtcggcgtcctgctctctggctgggtagcggatctgctggtacgtaagggcttttcactgggctttgcgcgtaaaacgccgattatctgcggcttgctgatctccacctgcattatgggcgctaactacactaacgatccgatgatgattatgtgcctgatggcgctggcattcttcggtaacggttttgcttcgattacctggtcgctggtttcttctctggcaccgatgcgcctgattggtttaaccggcggcgtgtttaacttcgccggtggtctgggcggcatcaccgttccgctggtggtggggtacctggcgcagggttacggtttcgcacctgcactggtttatatctccgccgtcgcgttgattggcgcgctctcttatatcctgctggtgggcgatgtgaagcgcgttggctaatccttcaactgtggaatatgtgccacaccactgcgcataatccactttcttaaagccggtgcggtcaggcatcggctttttactatcttgccgaagagttttaaacgcagtttgcgggtggcgcgccagtaagcggtattgagcttctctggctgcttcagtaacaccgaacgcagaatgtctgcgctatccagcgcatagctaatcccctccagcgagctggcgctgataaatcccgccgcttcaccaatcagaaaggcgttgtccttaccgcagacaaaatcctgccagcgtgagggaaacagcaccgtgcatttttcgcttttcaccgctttgccaaactggaactgaaaggcgctcattttctctttcagagtcgtgaaacgcgtctgaccgtctttcattggataggcaccgccaaagataaaataaccgtctttgctgatactccatgaataacagtcagttatcgcattatcaaagatgcaggagtagaacggcaccggatgtttctctgcgaaccactgctggattgcgacatatttacggatttgatgatccgggtagagatgtcgccgcaccatcgagttggcaccatcggcaccgaccagatagcgggcggtaatatgctgctcccagccgtctgcacgaaaaatgacatgccatttatcatcctcacgccagatttttcgacacaggctgtcgtgataaacctcaacgctggcggggatcagcgatttcatccacaagtcgaaagcatggcgattaatattgatatagcttcgctggtagttacgcgtgagcgatgcggcgacgtcgacggttttgacgctgaaaatctgcggattagcgatcacatcgacaggaagcgtcagcccatcgcgaataaaagatcgctgcgcgtccggtgccagcagaccgccacaaggtttgctgaaaccttcagtaccatgctggtgctttttatccagcgcgatcacctgcattttgccggctaactttcgtgccaacgccgaccctgccgggccgaggccaataatcgccacgtcgaaatgttccatcttttcactcacattcatcacgatggcaaaagactattgtctgaaagtgaagtccttgtgaagtatgatggctggacccgttttgtatcaggaccgcgccatgaaacagataacctttgctccccgtaatcacctgctcaccaataccaatacctggacgcccgacagccagtggctggtatttgacgtgcgtccttctggggcgtcgtttaccggcgagaccattgagcgtgtgaatatccataccggtgaggtcgaggttatctactgtgcgtcacagggcgcacacgtcggcgtggtgaccgttcatccgaagtcagagaaatatgtctttattcacggcccggaaaatcctgatgaaacatggcattacgacttccatcatcggcgcggagtcattgctgaaggcggcaaggtgagcaatctcgatgcaatggatattaccgcgccgtatacgccaggagcgctgcgcggcggcagccatgtgcatgtctttagcccgaacggtgaaagggtgagctttacctataacgaccatgtaatgcatgaactcgatccggcgctggatttgcgaaacgtcggtgttgctgcgccgtttggtccggtcaacgtacaaaagcagcatccgcgtgaatacagcggcagccactggtgtgtgctggtgagtaaaaccacgcccacgccgcagcctggcagtgatgaaatcaatcgtgcttatgaagaaggatgggtaggaaatcacgcgctggcgtttattggcgacacactttcgccaaagggtgagaaagtgccggagctgtttatcgttgagttgccgcaagatgaagctggctggaaagcggcaggtgatgcgccgttaagtggaacggaaaccaccctgcccgcgccaccgcgtggcgtcgtgcagcgacgtttaacctttacccaccatcgggcttatccggggttagtcaacgtcccgcgccactgggtgcgctgtaatccgcagggtacgcaaatcgcgtttttaatgcgtgatgataacggcattgtgcaactgtggcttatctcgccacagggcggcgagccgcgccagttaacccataacaaaacggatattcagtctgcatttaactggcatccgtcaggagaatggttgggctttgtgctggataatcgaattgcttgtgcccatgcgcaaagcggcgaggttgagtatttaaccgaaaaccacgccaatccaccttctgcggacgccgtggtcttctcgccggatggtcaatggctggcgtggatggaaggtggccagctgtggatcaccgaaactgatcgctaaatcagttatcaggcattctggccggtggaataaccgcattggtggcttgcgcgttggcttcgcttttttcaacgcgtgagcgcaccgagctgtctttgcggaacacatcccacggtaataaaagcgtgtccatcacagcggtaaacggcatatcgagaatcgccagcgacttagtgccccagttggtttcatcatcgccaatcatggtggcgctggcgcgggtgccgggatacgttccttctttccctccggtatgggacatcacgctggagcatcctccgagtaatgccattccgctgcatatcatgaacgctaacaacacatttcttatcataataaattcatctgttgatcgtgggtgttggcctgatgagttatagcgatcccttgctgaaaataacatcatcattacgtcgctctgtggcggctatcgcactttaacgtttcgtgctgccccctcagtctatgcaatagaccataaactgcaaaaaaaagtccgctgataaggcttgaaaagttcatttccagacccatttttacatcgtagtcgatgaggacgcgcctgatgggtgttctggctacctgacctgtccattgtggaaggtcttacattctcgctgatttcaggagctattgattatgcgtaactttgatttatccccgctttaccgttctgctattggatttgaccgtttgtttaaccacttagaaaacaaccagagccagagtaatggcggctaccctccgtataacgttgaactggtagacgaaaaccattaccgcattgctatcgctgtggctggttttgctgagagcgaactggaaattaccgcccaggataatctgctggtggtgaaaggtgctcacgccgacgaacaaaaagagcgcacctatctgtaccagggcatcgctgaacgcaactttgaacgcaaattccagttagctgagaacattcatgttcgtggcgctaacctggtaaatggtttgctgtatatcgatctcgaacgcgtgattccggaagcgaaaaaaccgcgccgtatcgaaatcaactaattccttaaggccgcctggcgcggcctgacatctccatgctcgccgtcagggagcatatgcgaatcttcggatttgcaggtacttactcgcttcttagaaggagaaatgactatgcgtaacttcgatttatccccactgatgcgtcaatggatcggttttgacaaactggccaacgcactgcaaaacgccggtgaaagtcagagcttcccgccgtacaacattgagaaaagcgacgataaccactaccgcattacccttgcgctggcaggtttccgtcaggaagatttagagattcaactggaaggtacgcgcctgagcgtaaaaggcacgccggagcagccaaaagaagagaaaaaatggctgcatcaagggcttatgaatcagccatttagcctgagctttacgctggctgaaaatatggaagtctctggcgcaactttcgtaaacggtttactgcatattgatttaattcgtaatgagcctgaacccatcgcagcgcagcgtatcgctatcagcgaacgtcccgcgttaaatagctaactagctattctctttgccccgccattctggtggggctttttttgtctttcttcttcaacaatgcgttaaatttcgactgtttaagatatttcggcacgttctttcccgtaataatgtgcgctataaggcaaatctgcttcaccgattcagccataatccgtagcaattaaaatgttatctcaagagaaatggacgatgagtgatatagcattaacggtcagtattctggctttggtggcagtcgtcggtttgtttatcggcaacgtcaaatttcgcggcataggattaggtattggcggcgtgctgtttggtgggatcatcgtcggccattttgtttctcaggcggggatgacattaagtagcgatatgctgcatgttattcaggaatttggcctgatcctgttcgtttataccatcgggattcaggtagggccgggcttctttgcctcattgcgcgtctccggattacgcctcaacctgtttgctgttctgatcgtcatcatcggtggtctggttaccgccatcctgcataaactgtttgatattccactgccggtagtgctggggattttctccggtgcggttaccaatacgccagcgctgggggcagggcagcagattttgcgcgacctgggtacaccaatggaaatggtcgatcagatggggatgagttacgcgatggcgtatccattcggcatttgcgggattttgttcaccatgtggatgttgcgggttattttccgcgtcaatgtcgagacagaagctcagcagcacgagtcttcacgcaccaatggcggcgcgctgatcaagactatcaatattcgcgttgagaaccctaacctgcatgatttagccattaaagatgtaccgattctcaacggcgacaaaattatctgctcgcgtctgaaacgcgaagaaaccctaaaagttccttcgccagataccattatccaactgggcgatttgctgcatctggtgggtcagccagcggatttacataatgcgcaactggtgattggtcaggaggtcgatacttcgctgtccacgaaagacactgatttgcgcgtcgagcgtgtggtggtcaccaatgaaaacgtgctcggaaaacgtattcgcgacctgcactttaaagaacgctatgacgttgttatctcgcgcctgaaccgtgccggggtcgaactggtcgccagtggcgatatcagcctgcagttcggcgatatcctcaacctggtggggcgtccgtccgcaattgatgccgttgccaatgtgctggggaatgcgcagcaaaaactgcaacaggttcagatgctgccagtgtttattggcatcgggcttggcgtattgttaggttctattcccgtctttgtgccgggattcccggccgcgttgaaactggggctggcgggcggtctgctgattatggcgttgatcctcgggcgtatcggcagtatcggcaagctgtactggtttatgccgccaagtgccaacctcgcgctgcgggagctggggatcgtgctgttcctctcggtcgttggtctgaaatctggtggggattttgtgaataccctggtcaatggcgaagggctaagctggattggttatggtgccctgatcaccgccgttccgctgattactgttggcattctggcgcggatgttagccaaaatgaattacctgaccatgtgcgggatgctggcaggttccatgaccgatcctccggcgctggcgtttgctaataatcttcatccaactagcggtgcggcggcgctctcttacgccactgtctatccgttagtgatgttcctgcgcattatcaccccccaattactggcggtgctcttctggagtatcggttaactcttttccgggtggagtcgccgtaaatggtactccacctggtattcgctggcatttctgaacatcactgaataattcaaaaactccccgctctcgctatatgacaacgaggtgatccgcagcagtggcgtgtgttccgctaccttcatttgccgcgccagcagtctatcggcgagcaccggcgtcaggctttcataattaccgccaatcaaaatcccgcactcttgttcaatatattcaaacttcgacccttccagatgttgcagcgaaagattacggaacagttttaccggcatatagctgtcttccagcatcagcggtttcccttccacaaaacgaacgcgacgggagaagtagatctgctcgttgatttgaatccgtaactggctggcaatggccggaggcgcaggcatgatttcaaaaatcagcacctggctggtgacagtttttccctgccgttttaacacctccaccagcccggtcagactggcggtttgatgcagtacatctttgcgcaccaggtaagtgccactaccgtggcggcggaccaccagcccccacgctaccagcaggtcaatggctttacggatggtcatccgcgataccgcaaactcttccgccagctttttttcacccggaagaaggctgtttagcgtgaaatctgcggagttaagtcgaattcttaaccgctccgcaatgcttttgtagatcatctctagatctcttttttgcctgcaagcccgggtaatgcgcacacaagttctgcttaatcgattgaaaaaacatcttttttttaaagatgtgttcgatgctgtgtacctgtgctcacagatgtctactttttcgcgaaaacgtagatctctaccgcccaacgaaaagcatgaaagcgatcacgaatcccattgggtcgtcatgttctgccgatcgcatcttcctatccttgctccaggcctgccgcataaccaatcaggcttcctacttacagaattgagaaaagaggatgtggaaatgctcagtcaaattcaacgctttggcggcgcgatgtttacgccagtgctgctgtttcccttcgccgggattgtggtgggtcttgccatcttgctgcaaaacccgatgtttgtcggggaatcactgaccgatccgaacagtttattcgcgcaaatcgtacacattattgaagagggcggttggacggtattccgtaatatgccgctgatttttgctgtcggtttacccattggccttgctaagcaagcgcagggacgtgcttgtctggcggtgatggtgagtttcctgacctggaactatttcatcaacgcgatgggaatgacctggggaagctacttcggcgtcgatttcactcaggacgcggtggcaggtagcggtctgacaatgatggccgggattaaaaccctcgataccagcattatcggcgcaattatcatttccggcattgtgacggcgctgcataaccgtctgttcgataaaaaactgccggtttttctcggcattttccaggggacgtcttatgtggtgattatcgccttcctggtgatgatcccctgtgcctggctgacattgctcggctggccaaaagtacaaacggggattgaatctctgcaagcgttcctgcgttcggcgggtgcgcttggggtctgggtttacaccttcctcgaacgtattctgatcccaaccggtttacaccacttcatctacggaccgtttatcttgggtccggcagctgttgaaggcggcattcagatgtactgggcgcagcatctgcaagagttcagtttgagcgccgagccgctgaaatcgttgttcccggaaggcggttttgccctgcacggtaactcaaaaatctttggtgccgtgggcatttctttagcgatgtacttcactgccgcaccggaaaatcgggtaaaagtggcgggcttgctgattcccgcaaccttaaccgccatgctggtgggaattaccgaaccgctggaatttaccttcctgttcatttcaccgttgctgtttgcggtacacgctgtgcttgcggcctcaatgtcgaccgtgatgtatctctttggtgtggtgggcaacatgggcggaggtctgattgaccaggttttaccgcaaaactggatcccgatgttcagcaaccacgcggatatgatgctgacccaaatcgccattgggttgtgctttaccctgctgtacttcgtggttttccgcaccctgattctgcagttcaacatgtgcacgccgggacgtgaagatgcggaagtgaaactctactcaaaagccgaatacaaagcctcgcgaggccaaaccaccgcggcagagccaaaaaaagagctggatcaagctgccggtatcctgcaagccctgggcggggtcggcaatatctccagcattaacaattgtgcgacgcgtctacgcattgcactgcatgacatgtcacaaacgctggatgacgaagtctttaaaaagctgggagcgcacggcgtcttccgtagtggcgatgccattcaggtgatcattggtctgcatgtatcccagctgcgtgaacagctcgatagcttaattaattctcatcaatcagcagaaaatgttgccattacggaggcagtataatgaccaaattctcagtggttgtcgcaggcggtggaagcacctttacgccaggcatcgtgttgatgctcctggcgaatcaggagcgtttcccgcttcgtgcactgaaattttatgataacgatggcgcgcggcaggaagtgattgccgaagcctgtaaagtcatccttaaagagaaagcgccggacattgcgtttagttacaccaccgatcctgaagtggcgttcagcgacgttgattttgtcatggcgcacatccgcgtcggcaagtacccgatgcgcgaactggatgaaaaaatcccactgcgccacggtgttgttggtcaggaaacttgcggacccggcggaatagcgtacggcatgcgttccattggcggcgtcctggaactggtggattatatggaaaaatattcaccaaatgcctggatgctcaactactccaacccggcagccattgtcgcagaagccacgcgtcgtctgcgcccgaatgcgaaaatcctcaacatctgtgacatgccaatcggtattgaaagccggatggcgcaaattgttgggctgcaagatcgcaaacagatgcgcgtgcgctactacggcctgaaccactttggctggtggacatcaattgaagatttgcagggcaacgacctgatgccccagctgcggcaatatgtctcgaagcacggttatgttccaccgcagcaagatacacatactgaagcgagctggaacgacacctatgcaaaagcgcgggatgtccaggcactggacccggatacattgccgaacacctatctgaaatattatctcttcccggattatgttgttcagcattccaaccctgaacatacccgcgcgaatgaggtgaatggaacatcgcgagaaacaggttttcgatgcttgccgcgccattacagcggcaggaaattcagcggcggccaagctggagattgacgaacatgcgtcatacatcgtcgatctggcggcggcaattgccttcaacactcaggagcggatgttgctgattgtgcctaacaacggggcaatccataactttgatgatgaagcgatggtcgagatcccgtgtctggtcgggcacaacggaccagaaccactggtggtcggcgatatcccgcagtttcagaaagggttaatgagtcagcaagtggcggtggaaaaactggtcgtggacgcctgggaacagcgttcatatcagcacctgtggcaggcgattacgttatcgaaaacggtaccgagcgcctcggtcgccaaagctattctggatgagttgctggaggccaacaaagcgtactggccagagttacgttaattgtgtggactggcatccgttgggtgctggtccgtattctttagcacggctgacggcgcataaccaaatttatccggtgcgccgtaaaaccccgtccctcagggcggggatataaggcgcggttttccacctaaccaggtgtttgctgttgttcaatgtattggcggatgacggatattggcgcacctccgcagctattggcaaaatagccaggactccacaaaacgcctttgtagtaatacctgactgcaatatctggtcgatctcgtcgcagtaacctacccgatacgcctttgaggctgtttaccagactggatatcgccagtttgggaggatagttaattaacaaatggacgtgatctggttcgccatccatttaaaccagttcagcttcaaaatcagcacatacatttgaaaagtaagtgcgtagtttttctgtcgcgtcatagtcaaaaatctgacgtcggtatttggtgacaaagaccaggtgaacatgcatcaggaaaacacaatgccttccacgccggatatcggtttcttttttcacagaccaaagtatcatttggcctgtgaaacgactacaagcatttaaattccagttaagacccggtggtcaacaggagcgtgaaatgaggcgcttcgcaggcgcatgtcgtttcgttttcaatcgtgctctggcacgtcagaatgagaatcatgaggccggtaataaatacatcccttacgggaaaatggcttcctggctggttgagtggaaaaatgccactgaaacgcaatggcttaaagatgccccgtcacagccattgcaacagtcactgaaagaccttgagcgggcttacaaaaacttcttccagaatcgggctgcttttccccgattcaaaaagcggggacagaatgatgtattccgctacccgcagggcgttaagctcgatcaggaaaacagccgtatttttctgccgaaactgggctggatgcgctaccggaacagccgtcaggtcacgggtgttgtgaaaaatgtcactgtcagccagtcctgcggtaagtggtacatcagtattcagacagaaagtgaagtatcaactccggttcacccttcagcatcaatggtcgggctggatgctggcgtggctaaactcgccacgctgtcagatggcacagtctttgagcctgtaaacagttttcagaaaaaccagaagaagctggcgagacttcagcgacagttaagccgcaaggtcaaattcagcaacaactggcagaagcagaaacgcaaaatacagcgactgcattcctgtatcgcaaatatccgcagggactaccttcacaaagtcacaacgaccgtcagcaaaaaccacgcaatgatagtcattgaggatttgaaggtcagcaacatgtcaaagtcagcagcgggtacggtcagcctgccggggcgcaatgtccgggcaaaatcaggtttaaaccgttcgatactggatcagggctggtatgaaatgcgccgccagcttgcgtacaagcagctctggcgtggtggtcaggtgcttgctgttccgccagcgtacacaagccagcgttgcgtgtgctgtggtcatacagcgaaagaaaatcgcctgtcacaaagtaaattcagatgccaggtatgtggatatacagcgaacgccgatgtaaatggcgctcgtaacattttagcggcggggcacgccgttcttgcctgtggagagatggtgcagtcaggccgctcgttgaagcaggaacccaccgaaatgattcaggcgacagcctgaacgtagcaggggtccacgtccttcagggcgtggaggatgtcaacaatggagcctgcgtccgtggcgtaaagatgcacggccgcgctggatgggggcatttcgtccacgcccacaagatggctattcgccggtggtacgtgactatgacaccggcctaccgacacaaggggtgaaggtggaagagaaaaaacagaagttctgacgataatgcccgctgatgatcacccggcgggcattattcaggctgcttaaaccagcgaaccgccggtcaggaaggaaaagataaggaatatcagcaaaatgctgcacacgatgccgataccaaaaagcaaggtatggaaagccagcgttccgccgccaaaaaccagcgcgccgcgaatgccccagcgattttccttacgcataccgccaacaaatgcgcaaagtagcgcagcaatggccagtgcgataccgctttgatcgaggattttatcgacatctacgtcctcttttttctccacggtggtaattttttcgccttttattccggcgagaagacctcttttaatttcagccgttttgtccgccacgatgctttcaagcgttggcggtggtgcggaaaaagggccgaatgaaaagtggataatccccatcattaaagcgatggcaccgaacagcatgcccaatgaactgattttattttgcgctatgatacccatctgacctccttgtagcggatggcaaaagcatatcaggaaacgggcggacgaaattcttaaaaaaaaccgctaaaggtagagagttagtgaaattgcaaaggagcaacaatgaaaatttcccgccttggagaagcgcccgattaccgcttctcgctggctaatgagcgtacttttctggcgtggatccgtaccgcactaggatttctggcggcgggggttgggcttgatcaacttgcgccagatttcgccacgcccgtcattcgtgaactgctggcgttgttgttgtgtctgttttccggcgggttagcaatgtatggctacctgcgctggttacgcaatgaaaaagcgatgcgtctgaaagaggacctgccctacaccaacagcttattaatcattagcttaatattgatggtcgtggcggtgatcgttatgggactggtgttgtatgccggatagccgcaaagccagacgcattgccgacccaggactgcagccggagcgcacatcactggcgtggtttcgtaccatgctgggctacggcgcgttgatggcgttggctatcaaacacaactggcaccaggcgggcatgttattctggatttcgattggcattctcgccatcgtggcgctgatcctctggcactacacccgtaatcgcaatttaatggatgtcacgaatagcgatttttcccaatttcacgtagtccgtgacaaatttttgatctccctcgcggtgttatctctcgcaatactgtttgctgtaacgcatatacatcaacttatcgtatttattgagagagtcgcatgacaggaagtcaggtcattgatgctgaagaggacaggcataaactggttgtagagtacaaggatgctctgcaacctgccgatttttatcacaatttcaaacagcggggcatccgctccgtacagctcattccctatcttgaatttgatgaccggggcgatctgacggccgcttcggtgacagcagagctgtgggggaaatttttaattgccctgttcgagtgttgggtgcgggcagatatcagtcgtatctcgattgagctttttgacgccaccttacaaaaatggtgtggcagcgaaaacccgcaaccgcgctgtgactgccaggcgtgcgactggcatcgcctgtgcccgcacgctcggcaggagacgccagacagcgtgctttgtgcgggctatcaggcgttttattcttactccgcaccgcatatgcgggtgatgcgtgatctgataaagcagcatcgttctcccatggagctgatgacgatgctgcggtgacgtgcgcttaaacgggctgcccctgatgcgacatccgcgtcgccagcggtagccagcacagcacgatcaacaatcccattaaggtcatcaacaaccccaggctgccctgaccggtttgcggcaacatcgcagagagcgacgccagcacgccggaaccaatgttttgcagaccgccgaccagcgcgccagccgtgcccgccaggaaggggaacggctccatcgcgccgctggtcgccagaggaaacagcatcccggcaccgaaaaagaacagcgcggcgggaacgagcagcgtccagacattcatcacgccaaaccagtcggggatccacatcagcaagccagccagcaggcagcagataaccgactgccacattaacgtggagaagcgtttattgggacgtccggcaaaccatgcgccaaaaaacgctgccggaatcggcagaataaacaaaatactgaccgtcatactgctcagccctaacaccgcgcccatcagcacgccggagcaggcttcaaaggcggcaatcccggccagaccgccaatcagcatcagcaaataacagttaaaaccgctgttaccgaaaagcgttttataactggtaagcaggcgcgtgcgcggtgcatcgaccggacgcgtttccggcatccagcgggccatactgaaggtcacaccagcacaaagaaccaacaaaaagagataacaggcgcgccagttccacatcgtatccagcagaccgccgattagcggtgcgagcaacggactgacgagaatccccatgtttaacaggctgttagcatggcgcaactgtgtccgttcatataaatctcgcggcaaagtacgcgccattacgccgccaacgccggtgcccatcccctgcatcgcgctggcggcaatcaataccgtcaaactggaggtcgtgaccgcgaccagcgttgccagcataaaaatggacattccgacgaggatcaccggtcggcgacccacacggtcggaaatcgggccataaaacagctgtgagacaccgtaagtcagcagataagcgcccattacgctctgcaccgccccttcacggacgttgagatcgcgcgccatatcggcaatagctggaatataaatggtttgcgccatctgaccgacggccacgagtaataccaacatcaataacaaattgacgtttctatgccttttcattatcacggatgcttttataaaaataattagagtaagtcactacgcattcccataaatgcgggagaggaatctatcacattgatgaatgttagccagatatacgccaggaatggggagttgtttagcggcagaatatgtaaacaaaagcggcaataaatgttgccgggagagatggtagggcggataagatacgtcagcatcgcatccgacaccaacccgcacgctaaatataaaaggggagcggttacccgctcccctttggtgcgacttgaatctgaattacttcaggtatttcagaacagcatcaagcagttgcagtgctgcaacaatgagtttgaggataagaatggcgatatccaccaggctcatacgcgtctcctgtggttcaggagcactgccagctgacgtacctttccgctgcctgttgccagctgttgtgcacgcggtatctcaaggagaaactttgtgcttgttgacataacacagtgtgctcacgcggggttaaggcgctgacggcaccacccgtttcagccaggacttagtgcgccgggtaacgatgcggcccccgcataacacattgcgtacagtgatattatagaagtttactgtataaataaacagtaatatttggacaaaacgcaaactgtgatcgatactcaactatgcactaaatacgtcaaaattcgtgccgaaattgcgcgttctgcgcggaacacgtatactttctgtgttgacataatacagtgtgctttgcggttaccagccgcgggcgactgacgaaacctcgctccggcggggttttttgttatctgcaattcagtacaaaacgtgatcaacccctcaattttcccttgctgaaaaattttccattgtctcccctgtaaagctgtgcttgtataaatattgttaaacacaaaaccaacaaggtccccaatgactacttccatgttcaacgcaaaactactaccaactgcgccatccgccgcagtggtcgtcgtgcgtgtggtggtggtggtcgtcggcaatgcgccgtagggactggaacaacacacgattccaaaaccccgtcggcgcaaaccgggcggggtttttcgtttaagcacctcccggaaagtcggcccagaagaaaaggactggagcatggcaagttcgggcacaacattgacgcgtaagcgctttaccggcgcagaatttatcgttcatttcctggaacagcagggcattaagattgtgacaggcattccgggcggttctatcctgcctgtttacgatgccttaagccaaagcacgcaaatccgccatattctggcccgtcatgaacagggcgcgggctttatcgctcagggaatggcgcgcaccgacggtaaaccggcggtctgtatggcctgtagcggaccgggtgcgactaacctggtgaccgccattgccgatgcgcggctggactccatcccgctgatttgcatcactggtcaggttcccgcctcgatgatcggcaccgacgccttccaggaagtcgacacctacggcatctctatccccatcaccaaacacaactatctggtcagacatatcgaagaactcccgcaggtcatgagcgatgccttccgcattgcgcaatcaggccgccctggcccggtgtggatagacattcctaaggatgtacaaacggcggtttttgagattgaagctcagcccgcggtggcagaaaaagccgctgcacccgcctttagcgaagaaagcattcgtgacgtagctacaatgattaacgctgccaaacgcccggtgctttatctgggtggtggtgtgatcaatgcgcctgcgcgggtgcgtgaactggcggagaaagcgcaactgcctaccaccatgactttaatggcgctgggcatgctgccaaaagcgcatccgttgtcgctgggtatgctggggatgcacggcgtgcgcagtaccaactatattttgcaggaggcggatttgttgattgtgctcggtgcgcgttttgatgaccgggcgattggcaaaaccgagcagttctgtccgaatgccaaaattattcatgtcgatatcgatcgcgcagagctgggtaaaatcaagcagccgcatgtggcgattcaggcggatgttgatgacgtgctggcgcaattgatcccgcaggtggaagcgcaaccgcgtgcagagtggcaccagttggtagcggatttgcagcgcgaattcccgtgtccaatcccgaaagcgtgcgatccattaagccattacggcctgatcaacgccgttgccgcctgtgtcgatgacaatgcgattatcaccaccgatgtgggtcagcatcagatgtggaccgcgcaagcttatccgctcaatcgcccacgccagtggctgacctccggtgggctgggcacgatgggttttggcctgcctgcggcgattggcgcggcgctggcgaacccggatcgcaaagtgttgtgtttctccggcgacggcagcctgatgatgaatattcaggagatggcgaccgccagtgaaaatcagctggatgtcaaaatcattctgatgaacaacgaagcgctggggctggtgcatcagcaacagagtctgttctacgagcaaggcgtttttgccgccacctatccgggcaaaatcaactttatgcagattgccgccggattcggcctcgaaacctgtgatttgaataacgaagccgatccgcaggctgcattgcaggaaatcatcaatcgccctagcccggcgctgatccatgtgcgcattgatgccgaagaaaaagtttacccgatggtgccgccaggtgcggcgaatactgaaatggtggaggaataagccatgcaaaacacaactcatgacaacgtaattctggagctcaccgttcgcaaccatccgggcgtaatgacccacgtttgtggcctttttgcccgccgcgcttttaacgttgaaggcattctttgtctgccgattcaggacagcgacaaaagccatatctggctactggtcaatgacgaccagcgtctggagcagatgataagccaaatcgataagctggaagatgtcgtgaaagtgcagcgtaatcagtccgatccgacgatgtttaacaagatcgcggtgttttttcagtaaccgctcaaggcttgaacaacatcgcgcttatcgttaaggtaagcgcgtttttttttacccgccaggacaagaccatgatcaccgttgcccttatagacgatcacctcatcgtccgctccggctttgcgcagctgctggggctggaacctgatttgcaggtagttgccgagtttggttcggggcgcgaggcgctggcggggctgccggggcgcggtgtgcaggtgtgtatttgcgatatctccatgcccgatatctccggtctggagctgctaagccagctgccgaaaggtatggcgacgattatgctctccgttcacgacagtcctgcgctggttgagcaggcgcttaacgcgggggcacgcggctttctttccaaacgctgtagcccggatgaactcattgctgcggtgcatacggttgccacgggtggctgttatctgacgccggatattgccattaaactggcatccggtcgtcaggacccgctaaccaaacgtgaacgccaggtggcggaaaaactggcgcaaggaatggcggtgaaagagattgccgccgaactgggcttgtcaccgaaaacggtacacgtccatcgcgccaatctgatggaaaaactgggcgtcagtaacgacgtagagctggcgcgccgcatgtttgatggctggtgatgaagacgttgttctcccgcttaattaccgttattgcctgcttttttatcttctctgccgcatggttttgcctgtggagtatcagcctgcatctggttgagcgccctgatatggcggtgctgttatttccgtttggtctgcgtctggggctaatgctgcaatgcccgcgcggatactggcccgtattgctgggtgcggagtggctgctgatttactggctaacgcaggcggtcggtttaacccattttccgttattgatgatcggtagtttactgacgttactgcccgtagcgctgatctcgcgctatcgccatcagcgtgactggcgcaccttgctgttacagggggcggcgttaacggcggcggcgttgttgcagtcgctgccctggctttggcacggcaaagagtcgtggaatgcgctgttgctgactttaactggcggcctgacgctggccccgatatgtctggtgttctggcactatctcgccaataacacctggctgccgctcggcccgtcactggtttctcagccaatcaactggcgcgggcgacatctggtctggtacttgctgctgtttgttatcagtctctggctccagttgggattgccggacgaactgtcgcgctttacgccattctgtctggtgctgccgattatcgcgctggcctggcactatggttggcaaggggcgctgattgcgacgttgatgaacgccatcgcgctgatcgccagtcaaacctggcgcgatcatccggtggatttattgctctcgctgctggtgcaaagtctgacagggttgttgcttggcgctggcatccagcggttgcgtgaacttaaccagtcgctgcaaaaggaactggcgcgcaatcagcatctggctgaacggttgctggaaaccgaagagagcgtgcgccgtgatgtggcgcgtgagctgcatgatgatatcggccagaccatcactgctattcgtactcaggcgggcattgttcagcggctggcggcagataacgccagcgtgaagcagagcgggcaactcatcgaacaactatcgctgggcgtttacgacgcggtgcgccgtttgttgggtcggttacgtccgcgccagttggatgatctcaccctggagcaggccatccgctcactgatgcgggaaatggagctggaagggcgcggtattgtcagccatctcgaatggcgaatcgatgaatcagcgttaagcgaaaaccagcgcgtgacgctgtttcgtgtctgccaggaagggctgaacaacattgtgaaacatgctgatgccagcgcggtcaccctgcaaggctggcagcaggatgaacggttgatgctggttattgaagacgatggcagcggtttgccgccgggttccgggcaacaaggttttggcctcaccggaatgcgcgagcgcgtaacggcgctgggtggcacattacacatttcctgtctgcacggcacgcgtgtcagcgtttctctacctcaacgctatgtctaaggtttgatgatgttgccgtttctgaaagcgcctgccgatgcgccattaatggctgataaatatgaaattgatgcccgctatcgctactggcgtcggcatattctgctgaccatctggctgggttacgcgctgttttacttcacgcggaaaagttttaacgccgccgtaccagaaatccttgctaacggcgtgctcagccgtagcgatatcggcctgttagcgaccctgttttacattacctatggcgtgtcgaagtttgtctccggcattgtcagcgatcgctcaaatgcccgttattttatggggatagggcttatcgccacgggcattatcaacattctgtttggcttctcgacgtcgctatgggcgtttgccgtactctgggtgctgaacgcctttttccagggctggggttcaccggtgtgtgcgcgtctgttaacggcctggtattcacgtaccgagcgcggtggttggtgggcattatggaacacggcgcataacgtcggcggcgcactcattcccattgtgatggcagcggctgcactacattacggctggcgtgccgggatgatgattgctggttgtatggcgatcgtcgtgggaatttttctctgctggcggctgcgcgatcgcccgcaggcgttaggtttaccggcggtcggtgaatggcgacacgacgcgctggagatagctcaacaacaagaaggggcagggctgacgcgtaaagagatcctcaccaaatatgtgttgctgaatccgtatatctggctgctttcgttttgctatgtgctggtctatgtggtccgggcggcgatcaacgactggggcaatttgtatatgtccgagacgctgggcgtcgatctggtcacggcgaatacggcagtgacgatgtttgaactgggtggatttatcggtgcgctggtagcgggttggggctcggacaaattgtttaacggcaaccgagggccgatgaatttgattttcgccgccggaattttgctttcagtcggctccctgtggctgatgccatttgccagctacgtgatgcaggcaacctgcttcttcaccattggtttttttgtctttggcccacagatgttaatcggtatggcggcggcagagtgttcccacaaagaggcggcaggggcggcgacggggtttgtcggcttgtttgcttatctgggggcgtcgcttgctggttggccgctggcgaaagtactcgatacctggcactggagcggattttttgtggttatctctatcgccgccgggatttccgcactgctgttactgccctttttgaacgcccagacaccgcgcgaagcgtgatgcatctcaccttttcacttcatatccggcaaaactaagaaattttccaggttttgcctggacgctatctcaggcctgatttgctgctgatttttacaatgcatgcctcacgcaggtattcatttcaggagtaacccatgctggctttcttaaaccaggttcgcaagccgaccctggaccttccgctcgaagtgcggcgcaaaatgtggttcaaaccgttcatgcaatcctacctggtggtctttatcggctacctgacgatgtacctgattcgcaagaactttaacatcgcgcagaacgacatgatctcgacctacgggttgagcatgacgcagctggggatgatcggcctgggtttctccatcacttatggcgtgggtaaaacgctggtttcctactacgccgacggcaaaaacaccaaacaattcctgccgttcatgctgatcctgtctgccatttgtatgctgggcttcagtgccagtatgggcagcggctcggttagcctgttcctgatgattgccttctacgccttaagcggctttttccagagtaccggcggttcgtgcagttactccaccatcaccaaatggacgccgcgtcgtaaacgcgggacattcctcggtttctggaatatttctcacaaccttggcggtgcaggcgcagcaggcgtggcgctgttcggggcaaattacctgttcgatggccatgtcatcggcatgtttatcttcccgtcgattatcgcgctgattgtcggttttatcggcctgcgttacggcagcgactccccggaatcttatggcctcggcaaagctgaagaactgttcggcgaggagatcagcgaagaggacaaagagacagaatctaccgatatgaccaagtggcagatctttgttgagtatgtgctgaaaaacaaagtgatctggctgctgtgcttcgccaacattttcctctatgtggtacgtattggtatcgaccagtggtcaaccgtatacgcgttccaggaactgaaactctctaaagcggtggcgattcagggctttacgctgtttgaagctggtgcgctggtcggtacgctgctgtggggctggctctctgacctagcgaacggtcgccgtggcctggtggcctgcatcgcgctggcgctgattatcgccacgctcggtgtgtatcaacatgccagtaacgaatatatctatctggcttctctctttgcgttgggtttcctggtctttggcccgcaattgttgattggtgtggctgctgttggctttgtacctaaaaaagcgattggcgctgccgatggtattaaaggcacctttgcttacctgattggtgacagctttgccaagttaggtctgggaatgattgccgatgggacgccggtattcggccttaccggctgggcaggcaccttcgccgcacttgatatcgccgcgattggttgtatctgcctgatggcgatagtggcggtgatggaagaacgcaaaatccgccgcgagaaaaaaattcagcagttgacagtggcataaacgtaactggtgacttttgcccggcatgacgccgggcttttttattattccgtgacttccagcgtagtgaaggcaaacttctcgacatcaaatagcccctgactggttagttttagcgcggggatcactggcagagaaagaaacgccatctgaataaacggctcatcgggtaacggaccgcattcacgggcggcggctttcaaggcgtcaatttgttccgccagcgactgcgccgtgtcggtgctcatcaggccggcaatgggcaacggcagatgactttggacctggccgttacgtaccacgcacagcccgccgccatcctgaatcacctgattgaccgccagcgccatctcttcggcactgcgaccgatcaccacaatattatggctgtcatggctgaccgtcgcagccagcgcaccttcattcagtccaaagccgccaagcaaaccacaagccggagccagccgttgcccgtaacgctcaagtacggcaataaagcacacatcatcgcgatcaaaaccattttcgctgtagacgctggagtgggagtgcgtaatcaattcgttatggatgacgtcaatgacccgatagcgttttccgggcgtaaattgcagggcaaagtcgctggcggaaactggctggcgggcaatggtgttgccatatggcggagcggattgtgccagtctcgccgactcttccgcctgtaaggtttgcgcatcaatcggctcgcctttcaccagtacctgctgcaccgtgaccttacgcgcatcgctcaacaggacgatatcggcctgcttgccgggtgccagtaagccgaggtgattcagaccaaagtggcgcgccgtcgaccagctggcgacgcgatatgccacatgcagcggcacattgtgttgttcgatcaggcggcgaattaaggcatcgatgtgtccttcatgggcgatctcccacgggttacggtcatcggtacagagcatgcattgcgggctgttaaattcgttgatcaacggtgccagcgcgttgagattgcgggcagcggacccttcgcggatcatcaacgacatgccgagttgtaatttccggcgtccttcttccagctgataactttcgtggcagttttcaatacccgcagtaatataggcgttaagttctttaccacccaaacccgggcagtgaccgtccagcgtcaggtggcgaaatgcatccagtttatcgagcagcgcattctgcccgctaattacgccagggtagtccatcatttctgcaaggccggtaacctgcggatggtcccgccaggcgagcatctgttcaagggtaaaactggcaccgttaacatcgcagccttccagggcgggtacgcaagagctgacctgtaagtactggttttgccttgcctgttcggcacagcgggcaaaccaggcgaatccggcttctcccatcacgttgacgatttcatgagggtcgcaaataacggtcgtcaggccgcgcggcagggtagcggtttcaaaagtgaccggcgtcatcatgctggattcaatatgcaggtgagcatcaataaaccctggcaccgccgttgcgccgcgagcatcaatccgctgcaaagccggagcatcagcgtattctgcgccaacaccggcaatgtaacgtcctttaatcacaattgggccggaaatttctccgccattgatcaggtcgagaatagagacattatcaataatataatcggcaacagcgtcgccacgggaaacggctaacaattcctggtattcagcccggctaatgtgatgaaatttatggttaatagaattattcatatttttctcattttgattttatcaatttgattattatttatcataaagaaacgtcgcgagattattaaagaatatccattaatgtgcaattgaaatgtgataattatcactgaaccgttgttgtcatttgttttacaaaagcaagggattaaatctcctccaatggacaaaaaaatgaataatgacaataccgattacgtgagtaatgaatcagggacgctttcgcgattatttaaactacctcagcatgggaccaccggtgatgctgccaacttactgatttagtgtatgatggtgtttttgaggtgctccagtggcttctgtttctatcagctgtccctcctgttcagctactgacggggtggtgcgtaacggcaaaagcactgccggacatcagcgctatctctgctctcactgccgtaaaacatggcaactgcagttcacttacaccgcttctcaacccggtacgcaccagaaaatcattgatatggccatgaatggcgttggatgccgggcaactgcacgcattatgggcgttggcctcaacacgattttacgtcacttaaaaaactcaggccgcagtcggtaacctcgcgcatacagccgggcagtgacgtcatcgtctgcgcggaaatggacgaacagtggggctatgtcggggctaaatcgcgccagcgctggctgttttacgcgtatgacagtctccggaagacggttgttgcgcacgtattcggtgaacgcactatggcgacgctggggcgtcttatgagcctgctgtcaccctttgacgtggtgatatggatgacggatggctggccgctgtatgaatcccgcctgaagggaaagctgcacgtaatcagcaagcgatatacgcagcgaattgagcggcataacctgaatctgaggcagcacctggcacggctgggacggaagtcgctgtcgttctcaaaatcggtggagctgcatgacaaagtcatcgggcattatctgaacataaaacactatcaataagttggagtcattacccggaattggattatttatcgccttaatgggattaaaaaatactggcgttattgtcgccaataaagacacgctggtgatgattggcgatttaagttctcacggcgtgttgttaggtattttagggttttttattataaccgtgttgtcatcacgtcattttcatgccgcggtgctggtttctattgtggtgacgtcttgctgtggattatttttcggtgatgttcattttagcggcgtctattccattccgcctgatattagcggcgtcattggtgaagtagatttgagcggcgcgttaacacttgaactcgccggtatcattttctcctttatgctgatcaacctatttgattcatcaggaacattaattggtgtaactgataaagcgggcttaatagatggtaacggtaaattccccaatatgaataaggcgctgtatgttgatagcgtcagttcggtggcgggtgcgtttatcggcacctcgtctgttactgcctatattgaaagtacttctggtgtggcagtcggtggccgcacggggctgactgcggttgtggttggcgttatgttcctgttggttatgttcttctccccgctggtggcgatggttcctccttacgcaaccgccggagcgttaatctttgttggcgtgctgatgacttcgagcctggcgcgcgttaactgggatgattttaccgaatcggtgcctgcgtttattaccacggtgatgatgccctttactttctcgatcaccgaagggattgcactcggctttatgtcgtactgcatcatgaaagtgtgcaccgggcgctggcgcgatctgaacctgtgtgtggtggtggtcgcatctctgtttgcactgaagattattctggtggattagtaactggcgagggtttccagatatcatgagttctgataacgcaggagaactcatgatctggataatgctcgccacgctggcggtagtgtttgtggttggttttcgggtgctgacatccggggccagaaaagcgattcgccgtctcagtgatcggctgaatatcgatgtcgtacccgtggagtcgatggtcgatcaaatgggaaagtcagccggtgacgaatttttacgttatttgcatcgcccggatgagtcgcacctgcaaaacgccgcgcaggtgttgctcatctggcaaattgtcattgtcgatggtagcgaacagaacctgctgcaatggcatcggattttacaaaaagcccgcctttccgcgccgattaccgatgctcaggtcaggctggcgctgggttttctgcgcgaaaccgaacctgaaatgcaggatattaatgcttttcagatgcgctataacgcgttctttcagcctgccgagggcgttcactggctgcattaaaaccgcttcgtcttatcagcctacagaccgcgcctgacctgtcgggtggataagacgttcacgccgcatccggtaatctttgccctgttccgtttcgatcttaactccagctcaagcaacaccgtaaaagttgcaaaaacgttaaatgcgtcacacatttcaatgttaaagtggtcggcttttcccctgaaacatgccacgggtaacaccatgagtgaatttattgccgaaaaccgcggcgcggatgccatcacccgaccgaactggtcagccgttttctcggtggcgttttgtgtcgcctgtctgattatcgttgagtttttgcccgtcagtttgttgacgccaatggcccaggatttaggcatttcggaaggggttgccgggcaatcggtgaccgtgaccgcctttgtggcaatgtttgccagtttgtttattacccagacaattcaggctactgaccgccgcaacgttgttattttgtttgccgttttgctgacgctctcctgcttgctggtttcctttgctaactcattcagtttgcttttaatcggtcgtgcctgtctggggctggcgctgggcgggttctgggcgatgtcggcgtcgctgaccatgcgtctggtgccgccgcgtacggtgccgaaggcgctgtcggtgatcttcggcgcggtttctattgcgctggtgattgccgcgccgttgggcagttttttaggcgagcttatcggttggcgcaatgtctttaatgcggcggcggtgatgggcgtgctgtgtattttctggattatcaaatcattgccttcactgccaggcgaaccctcgcatcagaaacaaaatactttccgcttattacaacgtccgggtgtgatggcagggatgatcgccatcttcatgtctttcgccgggcagtttgctttcttcacatatattcgcccggtgtatatgaacctggcgggattcagcgtggatggcttaacgctggtgctgttgagttttggcattgccagctttatcggtacgtcgctttcgtcattcattcttaaacgttcggtaaaactggccttagcaggcgcgccgttaatactggctgtgagtgcgttggtgctgacgttgtggggaagcgataaaatcgttgctaccggcgtggcgattatctgggggctaacttttgcattggttcccgtcggctggtcaacgtggatcacccgctcactggccgatcaggcagaaaaagccgggtctattcaggtggcggttattcagcttgtggcgcggcaatcggcggttatgcgctggataatattggtctgacttcgccgttgatgttttctggcacattgatgttgctgactgcattgttggttactgcaaaggtgaaaatgaagaaatcctgatatcaggtaaagaagcgttggtcagtagttgttgctgttcttacatatccgggcattctaccttacccaacgcttcccaataattgctctgattattacgttccatcgccacgatggcctcgcgtatatgttgtttattgttttcatctgacaacattaacttttcccacgcttcatctgataatgacgcctgtggcgtgcaaattttacgtaaatcttgtaataccgtggttttctcttttgcggactgcagtgagctaaaaggcgactcggcgtatacgatgcctggcatagcgaaaaaagtgaaaataagcagtagtgtcgttggtttcatggattcaaccttttacaaatgtgtatcgaatgaagcataagtgtagtttgctttcatcgctctcatcatgctgtacgaaacgcgcttgcgtggtcagtaagaagtgccagactttatattccacttttattcctttttattcttatcgatagcgtttcgttttttaaaccgcagcgaccttaccgctatagtcaggtaatcattaataaaaggataaaaaaatgaaactgacaacacatcatctacggacaggggccgcattattgctggccggaattctgctggcaggttgcgaccagagtagcagcgatgcaaaacacattaaagttggcgttataaatggcgcagaacaagatgtcgcggaagtcgctaaaaaggtggcaaaagagaaatatggcctcgatgttgaactggtaggatttagcggttcgttgctaccgaacgatgcgacaaatcatggcgaacttgatgcgaatgtcttccagcatcgaccctttcttgaacaagataatcaggcgcatggttataaactggtagcggtgggaaatacgtttgtcttccctatggcgggttattccaaaaaaatcaaaaccgtggcgcaaataaaagaaggcgcgacagtggcgatccccaacgacccgaccaaccttggtcgcgcacttttactgttgcaaaaagagaagctaattactctgaaagagggaaaagggttattacctaccgcgctggatataaccgataatcctcgtcatttgcagattatggaactcgagggggcgcagctcccgcgcgtactggatgatcccaaagttgatgtagcgattatcagcaccacttacattcagcagacagggctttctccggtgcacgacagcgtatttattgaagataagaattcgccgtatgtgaatattttggtggcacgggaagataataagaatgcagaaaacgtgaaggaatttctgcaatcttatcaatcacccgggtgatgctgccaacttactgatttagtgtatgatggtgtttttgaggtgctccagtggcttctgtttctatcagctgtccctcctgttcagctactgacggggtggtgcgtaacggcaaaagcactgccggacatcagcgctatctctgctctcactgccgtaaaacatggcaaatgcagttcacttacaccgcttctcaacccggtacgcaccagaaaatcattgatatggccatgaatggcgttggatgccgggcaactgcacgcattatgggcgttggcctcaacacgattttacgtcacttaaaaaactcaggccgcagtcggtaacctcgcgcatacagccgggcagtgacgtcatcgtctgcgcggaaatggacgaacagtggggctatgtcggggctaaatcgcgccagcgctggctgttttacgcgtatgacagtctccggaagacggttgttgcgcacgtattcggtgaacgcactatggcgacgctggggcgtcttatgagcctgctgtcaccctttgacgtggtgatatggatgacggatggctggccgctgtatgaatcccgcctgaagggaaagctgcacgtaatcagcaagcgatatacgcagcgaattgagcggcataacctgaatctgaggcagcacctggcacggctgggacggaagtcgctgtcgttctcaaaatcggtggagctgcatgacaaagtcatcgggcattatctgaacataaaacactatcaataagttgaagtcattacctaaaggcccttgatgatctctgccatcgcgttgtcatacgagtcgcctgtactccctgttgatgccagcagttttgcttcttttagtcgcgccttataggccagtgacacatactgagagcctttatcgctgtaatggatggtgccagacggacgacgggcccacaacgcctgctccagtgcatccagcacgaatgtcgtttccatagacgatgagactcgtcaccacacgatgtatccggcaaacacatcaatgatgaacgccacatagacgaagccctgccatgtgctgacgtaagtaaaatcagccacccacagctggtcaggacgttctgccacgaactgacggtttacgcggtcacctgcggcaacggttttccggctgacggtagtgcggacctttttaccccggagaacaccgacaagtcccataaccgccatgaggcgcgccactgtacatctggccaccctgattccttcccgtaacaactggcgccagactttacgcacaccgtacacctgatgattttcatcgtatacgcgctgtatctctctcttcagccagtcatcgtgctgcgcacgggcactgcgtttatcaggatgatgtcctgttgctaacagtggtaatacgttgacggggcaatatgcagttcactgcataccggtccgaccccgtactgcccacgcagcttatccagcagtggcattattttttccagaggcggtcgaactccgccttcgcaaaataagcggaagcctggcgaaggatatcgttactgcagcgcagttcacgattctcacgctccagctctttcagacgctgacgttcagcggtggtgagccctccatcaccgcccctggtatcccgctcatgctggcgaacccagacacgcagagtctccggtgtacagccaatctttggagtaatggaacaaattaccgcccattgtgagtcatattcgccctgactttccagaaccatacggactgcccgttgacggacttcgggggaaaacgagtatttttagtcatcctgtttacctctttctcagggagtttagtctccaggattcccggggcggttcattatctaaaaaagctgaaagccttagctcaggaaaaattacgattggaacaaaagaaaaagtaatcattattaatgagttaaggcaatgtcatccattatcacaattactggttatcgcggatttgccacgtagtacattttactatcacgtgaaacgccttaatgcgccagatccatatcaacttgttaaacaagtaatattgagaatataccatcagcataaagggcgttatggttatcgacgcatcagacttgcctgccgtaacgagggcattttacttaatggtaaaaccatcagaaagttaatgaaggaactgggtatcagctcacttatcaggcgcaagaagtaccgtgcctatcgtggagaacaggggcgaacttgtaataatttactgaagagacaattttatgctgaccgcccaaatcaaaagtgggtaacagatgtcacagagtttaaggtcgatggcaggaagctctatttatcaccaatcatggacctgtataatggagaaatagtctcatataaccttactgagcgcccattagcatcaatggtaaagagcatgctattagatgcggtagaacaactcaataaagacgataagcccttgttgcatagtgatcaggggtggcaatatcagatgcctcgttggcaacgttggttgagtgataatggcataacacaaagcatgtcccgacgtggtaactgcttagataatgcagcaatggaaagcttttttagtactttaaaataagaatgttactacctaaataaatacaataagttacatcatctaaagcaagatataattgattacattgaatactacaatcaccatcgcattaaagagaaactcgatggcatgagtccggttcaatatcgacttaaacatttttcataggatgtccaagatttggggcgcagatcatttgaaaaggtgggcacctacgttaccaatactggcttaatggctacatacggcagtcggtttacgcttacctccgttaacgcttacctccgttaacgcttacctccgttaacgcttacctccgttaacgcttacctttaatctgctgaatttcgaattgttcaggagtaatagtccaaagtatcgggaattttccagacaatcctgataatacgcttatgaacattacaacacgctcatgcggaacctggatgggggaaggaacggtgaagctgttagcgaatgaccggcgtttgtataaacgccggtcatgatgaatgatatttcagaatatacctcgggctaaaataccgggacagagatcaggcgtgattaatctgcagcatttttaataacagaagtactgagcttactttacctttgatgatgtaatagttatttccgtcggtactcatttttccctgaaataatgtcacggatgtttcttcctgctgatcctgcaggcgcagtcgtaaggtcatatttttaatgagctgagatccgggtggcaaggggtatttgctgtcagatactgggcgactgagtctgatgtggcgcgtatacagcccgttttcgtacagggtggcctctgttatggtgtcagtgaccagcatgtgggtaatgactccaacttattgatagtgttttatgttcagataatgcccgatgactttgtcatgcagctccaccgattttgagaacgacagcgacttccgtcccagccgtgccaggtgctgcctcagattcaggttatgccgctcaattcgctgcgtatatcgcttgctgattacgtgcagctttcccttcaggcgggattcatacagcggccagccatccgtcatccatatcaccacgtcaaagggtgacagcaggctcataagacgccccagcgtcgccatagtgcgttcaccgaatacgtgcgcaacaaccgtcttccggagactgtcatacgcgtaaaacagccagcgctggcgcgatttagccccgacatagccccactgttcgtccatttccgcgcagacgatgacgtcactgcccggctgtatgcgcgaggttaccgactgcggcctgagttttttaagtgacgtaaaatcgtgttgaggccaacgcccataatgcgtgcagttgcccggcatccaacgccattcatggccatatcaatgattttctggtgcgtaccgggttgagaagcggtgtaagtgaactgcagttgccatgttttacggcagtgagagcagagatagcgctgatgtccggcagtgcttttgccgttacgcaccaccccgtcagtagctgaacaggagggacagctgatagaaacagaagccactggagcacctcaaaaacaccatcatacactaaatcagtaagttggcagcatcaccgtatctgagttagttattgttgttccatcgtcagtggcggcaattctagtaaaagtctgattgtgtccatttaaatctagcgtgccaccacgtttagtaaaaaatatccccgcatattgatcattgccaagggaattatctttatttagtattaccttaccatttccgcttgcaaggtatatattgttaaatgttccttcttcattaagaagaacatttccttcacctatctttatatttgccccctgttttttttgaacattcagagtaccggggcctattttgtgtaaaacatcatcactggaatacaatgcattccagtttacaatgctttcttttccgatatcaattcctgctcctttaaatgtaaatccctgaccgtttatgttatattcatggccttcgtcaaagataataccaccgctaccaaaatccaaattatccttaaacaggacatctcccccatttgtgaacacaatatctttgtctttagttattttttcttgagtaccagtggtatctgcattgttttggtgtaatgttatatctgtgtttttaatggttacattattgccattcagatttattttatgactataggtatcttttaactcactaaccagtttatcattgtattttgttatccatgtcagttggtcaccattaacgctggcaataccatgggttgttccgactaatacccatttttctagtttgttatcatataagtatgctccagagccgctgtctccgaatatttcaagattacgaaatgttttatcatttttataaatcatcatgccgtatgagtcccattgggtgacctcaaatagactagcacttaacagatcatggctatatgctgaatttgttgagattttggattcaccattaataaatgatgttcctccagagccagcacgaaaacctatgattttttttgaaccgtcagaagtgactataccgtagcgttctaatgcatcagaatatgttgtagggttggtctctgccggggtggcacctactgtttccacaacaaatttatttaacctctgaatctcaaaatcattggaatttcttctgtcaacaaccttgtaagaagactgagcgtaaacctgagtttctgcggcctgagggttctttttgttatgtgcaacagtaacactataagaacctcctattgcggtagctgcgccactcgctgctgcaccagaaaaatccggaattgagagattatggaaagagaatttatctccgttttttaaagtgattgttacgtctgttgctccgggctggaaaatacctttattttgtgcaagatcaagatagtctctcgcccatacatttgatatatcaatatttgctgcatttactgtacctgcaacagccagagacaacattgttgctacaagttttcggtttgttttaccagaaactcttttcgctaattcagaaacagcaataagtccgccagtggcagcactatatttaagggagtatattttattcatatattctctcggtaatgactccaacttattgatagtgttttatgttcagataatgcccgatgactttgtcatgcagctccaccgattttgagaacgacagcgacttccgtcccagccgtgccaggtgctgcctcagattcaggttatgccgctcaattcgctgcgtatatcgcttgctgattacgtgcagctttcccttcaggcgggattcatacagcggccagccatccgtcatccatatcaccacgtcaaagggtgacagcaggctcataagacgccccagcgtcgccatagtgcgttcaccgaatacgtgcgcaacaaccgtcttccggagactgtcatacgcgtaaaacagccagcgctggcgcgatttagccccgacatagccccactgttcgtccatttccgcgcagacgatgacgtcactgcccggctgtatgcgcgaggttaccgactgcggcctgagttttttaagtgacgtaaaatcgtgttgaggccaacgcccataatgcgtgcagttgcccggcatccaacgccattcatggccatatcaatgattttctggtgcgtaccgggttgagaagcggtgtaagtgaactgcatttgccatgttttacggcagtgagagcagagatagcgctgatgtccggcagtgcttttgccgttacgcaccaccccgtcagtagctgaacaggagggacagctgatagaaacagaagccactggagcacctcaaaaacaccatcatacactaaatcagtaagttggcagcatcacctattctctcaactcatttattgaatgaacaaagtattaagaattaaaattattagtaacagttggttactaacagcttactaaaagtaacagttctatattgtaaatatgtgacaatgttctcattaatgatgagagattatgtgaatcaatactaattgatcgttttttgttttttttttgcccaatgcggggaggggtaatgtttaatatttcgatatgatcgaatatctgttcgcatggaacatcgttcagtgattcacggcgaattagcgatcgaccacgatgcgattttgcagtgtgccgaagaagttctccatcactgcgttattcagaccgtttcctttgtgtggcatattttgtgctactccatggggctttaactttgcctatagcctgccattcgatattgccaaccctgatccgtatgtagttacggggcatcctccgggccgggcaccgacaatgcatcgtgcaccatcgtattaacaatctccattaccggactttatgacaggcgcaggagaaaatctcccggttaaactgaacggagaaccagcgacaggtacctctttttaccctgtagcaagtactctataacatactcccccatttttcgttggccttcattgcagcaaagttccggctcaggatattgggcgcagatcatcctctcaggaatttcaggatctgccagacggtgctgagacgacgcttacttgtaaggttagttttcagacggacaatgaaatgaggatatgcgataaatttcagtcaaagatccataaaacagaaataatgttattcagtggtgaacagtccattccggagacggaatatcttgttaaggctgtatattatactggctgtaaacaacatggccaccaaggaccatgttgtttacagcatacccttgttgcaaaagcatccccgtcagaacagcactgagtagttcagaccaaaggttcggccccggcctttgtagtcgtacagtgaagcagggccgtaacccgggcagtagtacagaggtgcacgctgtccccagacagtggtatagtcacggtcgaagaggttctcaacgctgaagctgagtgttcccaccggaagctgccaactactgataaaatcgacggtagtgtaaccattaatatcgttaccctctgcatcgcttacgtcgaaagaagtggtgctctgtacacgcagactccacggttccggcgcccagttaatgtaagctgtcgctttcgatggacttgattccttcacgtcatatttttgccattgaccgttcactttcgactcggttttcagcacattgaagttcacaccggtactccagtcagtatccgggatcaggtagtccaccgcaccttccacgccgtaaatacggcgcctgtcgtccttcacactgatggtcagatctttattcctttccacgctcttattggaaagcgagtaatatgccgcgatttgagtccgcaggttgtcaccggtaaagcgccagcccagttcataagaatcgactttcacgccttccagcttactgtcgctgacgttcacgctctttgtcagggaaagatggccgttcactgctgcaccatagatgccgcgaccataatatttccccggatccggcaatgccaccccctgggaaaaattgaaccatgcctgctgacgttcggtgatgtgcatcagcagaccagcattgaacagaaagttatcgtaatctaccgaaccaccaggaatggcgtcggcagatatcgccttcccggcagcaatcttctgttgctgcgtgtagtcgatgaaatcatctaccctgttctcagtatactgatagcgtacgccaccgctaacggtaaaaatatcattaatgtcatagctggattgcaggaaggccgccagattggtgatgtcatatgacggatagcgcccggtggtgtaaatcttatggttgttcagccctccggaagcacttgcctgagccagatcgaagaacatctggttggaggtaaagcgctcatgctcagcatccagcccccaggtgatttgccagccgtccatcagttggctgttcagagtcagtttcatgccgtactggtcggtatcctgctgtgacgaggagaaagctgtcgcctgtttattcgcatttaccgtcgggaacgggtagtaccgcaacgactcatcgcggtagtaaacctgaccgaccagttcctgtcccaggaaatcactgtcagagtactgcaggctgatcaaatgccgctcagtgccgggaatgcggtcagaattcagccccttactgacgtatggtgtgctgctcccgctgatggcggaaaagcctttcccgagattaagcccgtaattgtcgtctccctgacttttatagtactgcgttatcagttgaagctgccgggattcatcgatgttcagcgtaccggttcccatgatgtccagccgattggagtgctgcaggccggtctgggtgttatcaagcagggtggcatcgccgttaccgtcaaaccagccgccaaatttctgatatgccacggaaagacgtccggagatatggtcatttccgccggagacagcaccggcaatgcgctcatcgtgatctttactgctgttaaagccactttttgtgccagcctcaaactccatcatggtttccggctgaccttttttggtcacgatgttgatcaaccctccggtactcccgccaccgtacagggccgtcgcgccggagatcacttcaatatggtcgatattaaaaggatcgacagagtccagttgtcggctgtcggaacgtgaagagttgaggcgcacaccgtcaatcaggacaaccagcgggcggccacgcatgttcataccgtagttggttcgactctggctgctgacatcaaggccggggattaactgagccagtgcgtctttcagctctttaccgccctgaatctgctgctccagttcggcattttcgataacccaggtggtttgcgccatctccgctacagttcgattgctgcggctggcagacactatgatctcattatcatcgttttgctgggcgacagctggtgacagcacgacaagaagcagcggaccaagagcccggggcatatactttttgcgcatcatcgttattcctgaatatttgctgtatagtgagttaaagaagcagcctccggctgcggttttttccggctgccgctgcgccactgaatcagtgcgggcggcatactgagatcgaataaatcacgccccagtacgcgattaagaatacgtgcagatcgccaggccatcaggctgagctggggttcggcgatgccatgagtttgcatgctggcgttgaccgcaaagatgttattttctttcgggccactccattccagagtgaagtcatcacgcactttaaaggtgttcttatcgtgcatggtgatcaagggcatcagtgagggaagtatttgtggcaatgcagaacggtaacctgtggcgaaaatcaccacatcactttccaggctctctctgccctgatccagatgatgttccatcaataacctccagcccggaccactactttccagggttgttaccgagcgactgggtagcagacggatatttcttggttttctcagaacttcaaaacggtggtacaactcacgataaatggtcagtaaagaatcggcagtgatgccatccgatgtcattttctgctcatccagtaactgatggcgaatatcttccttcagtccggagaagcctgaaatatattcaggtgtaaaatactcatcagcaaaagcagcctcatccagtgcgttaaaattattacgccgtgagacccagtttatttccgccgcttctccccattccccgcgtaatgcattaaggaacaggtctgcaccactctgtcctccaccaaccacggttatccgttttccactcaggtccggccgacgaagattcatttcactggcatggaaacaggattgtgtcacatgcttcacacagggtggtaaataaggttgttttcctgtaccaaggcagatattgcgggcaaaatattctccccgactggtctgaaccagaaacaatcgactttttttgtcgaaatcaatattttcaacggtatgactgaaatacaggttattcatatcttcagcagcccagcggagatagtcagaaaactcttcacgggatactgtacgtagcctgcttgtaaggaagcgatagaactttttgtgcttcaccagatagttaacaaagctgtagggatttgtaggtgcaactgcactgaccagatctttcagaaagacggtctgcatatgacaatccggtaccagcatacccggatgccaggaaaaatgaggatgttcgtcaaagaagagacagttcagttcttcgatctgatgtgacaatgcagcaatgctgagattaaatggccctgtcccgacaccaataaaatcgacactttttttcatgattcatattcctgagttaccagccacagcggattttgcagattctcaaggtaattcggcagcatgcgactgccgccatccaggtccggccaggtcagttttaccgggttcagcaccacgcgaatgatttgtggcctgaagagtgagaaaagcgcaaaacgctctgccatttgtggatgtttgttcatgtaatcactcaacactgctgccagcagttgataaaatcgcctttcaggtacgccaagacgaaccatcagtggcgaaataaaacgcagtactgtcacgaagtgacccgtctgcaaatcatggattaagtagtccgcactcagacgggatgtggcatcacgcacctcctgaggcaaagagtccatttcgggaaacgcttctttcaccagccgcatatcgccctggaagtctttcagcagaacacgctgtggtaccccctctttcatggcgagcgttatattttgtccgtgtgcaataagcgcgacaccgtagcggcaaagcaggtgatacagcggaaccacaaccacccggaacaattgcgtaagccaggtttcagcgtccagtccggagcggtcgatatatgcgcctgccagcggctgattgttttcgtcgcactccatcagtgttgccatcagaacaggactttcatccggtttcagccagcggcacggattctcccgccagataacaccaagcatttcctggtagcgatagggagcccgggcaagcgcggcatagccttcatgggacacatagcctgcagccggttcaccaaggatcactgcgccgctttgcaccagggtggcgtcggtcgcaaaaacctgttgcagccagcgtgaagccagtggtccggcagcgatatatctgccagggattccccggtagcatgaggtgttgtagatggtcagcggcagcttgatatccagccctccccggcggctggcgttggtcagggtacgcagcgactgctgggcgagccactggtcgccaaactcgccgagagacaccatcctgccttcgacaaaatcagcgatgaagtctgtggcgattttttgctgccactgccacggatgtaccggcagcggtagccagttgtgatccagcccgttttcctgccagacctgactgaagcgtgtaaactcctgcggatccattgcggcagtcaacaactgctgaatatccagatcgttatcgcagcgccagatcatatgttcacgttttaccgccagccagtgcagtctgaaggtgttggtatactctggcgcatatcgttccagcgcctctttgccccagccacggcgacctttattaaaaacgaatttaggatgaccgctcagcaggcattgcagacgatcggcatcaagattaatcaggtcactggcactcagtccgcgacgggccttcagcagttgcaggtcgcccagtagcgtggcatacaaatcctgcatatgctctgcaacagtggcatcactcattgacagcaccggctttagctgcatcagcagcgtctgcgccagtactggttcgtccgtgcagcgcaacgtttgggcatcaatccacagccagccccagataccacgttcagcgatgaagcgccattgtgctcccggcaggttaatgcagtagtggtcatcgccctgagattccgcgtggaaaacctgctcatactccatctcagacaacatttttgccaccagccgacggttaacaaaatcccagtccttgtgattcattacagaccgacctccgtgaagaagtgatgacgatccgccatcaccatgcgcgagcgcttatgtgggaagtcgaactctttaattgtccggtatcccgcaggctcaagatggcggaacaggcgctggttatcggtgcgtggctccagtactgtgcgctgcgtacggggctcatccagcagcaggtaatgtgtcagcccgcgcagccagctttgcacatagtgggccccgcgccattgctgttcaccaaccagcagatgcaggccacggtcaaagggctgccacgaatagtgacgaccaatgcggtcttccgccgcccagtagatttcgaaatagctgaatggccgatcgtcgaagcacccaatcagcgggaatgcatgtttaccggtgagctggcgctccagataggcggtctgtacctccagtgagccactttgctcccagaaatactcaacgcgcggatcattcatccagcgggtgaaacgttctgcatcagaaacgggatcggcaatgcggaaactcagcatcctgcgaatacgtggatcgtaacggcggtaaacctcaccctgtggacggggtgggcgctgcgggaaataaatctcacgctctgcatcaaaaaccatttcaccggaggcccggtttgccggtgaactcaaccataacggtaactgccagaaggcagtacgatggataatgtcgctttttacctgcccaaaaagcgtcagcgcctgtggctcctcacgccattcggcccaggggagagccactgctgacagttgtggtgcggcgataaatatctgatccagcgcatcgcacagccaccctgtcggcagctccccgggacagtgcaacaccgcgctattgtccagtccccagccaagattcaggggcttgtcgagtttttcacagcgcagtccatatctgctgtgaataatgtttgcctcagacattcagacctcctgagcctgcagcgggttagcgaaatcgaaatagatcaccgaagggtcaacaatggtgttctcgttatgatcgttcagataacagaaaaagttaccttttacgttccagtacggactttccagcacgtagttgagacaggttttatgagtcacctgatcacgcacttcagccagcgatgctcgtacacgagccatcagattcgattcgctgtccagcccggcagcccccagcgcagcggtcacagcaaaagtggagttaaccagcaggtaataagggaaatagcgcagcaactgctcatgggtgaaaatattttccgcctgcgcctcgccaatagaatcgagccagtctgtcgcgtgaggcataaaagcgctgccctgacagtcacggtaaataaatccgaccggcagatccccaagcatctggacaagaatattttgctgatgcgccagcagcaccaggccgtaatccgcttcagccgtaaacagcggctttagcacttgctgacagtatgcatcgacccatgcatgggcggcctgttgcacagtgataccgaggcgatcgctcaggcgttttaccgccgaaaccagcagcgaatcaccgccatcaggtgcggcctgagtcagggagaccagtacgttagtctggcttttcggctgatccaccagcagattttcacgcagggcaaacagactttcctgcatgatgttgccgttaagatcgagcagcccggcccagccatcctcctgcattacccggaaagtcgggaagcggacctgtagcatctgccagccgtcggtttgagccaggcgtgccaggcgcatcccacgcttcacttctttcacggacagagtacggatggagttggtcagccgtacgctcagggagaacttgatcatatcgcggctggtggcacagtagagggaacgggaagaggtggtcggcagccacgacgtgccggcctcacctaagtctttaatcagccctttagcaacaagtgcctggcaccacccctgctgcaaaagatattccccctgccacgggtgcaacgggaacagccattggttgtcacttaattcgttgagtaactgaggcgcattctctgcggcaaatcgcgtcagccgctgttgaaggttgagatgcaaactttcaccggcgatttgcgttttatccaccgaaaaccaccgcagtgggaagtggggtgccatatcaggcaggtagcgttcagcctcccgtcggttaaacggttcatgagacttaggcgcagggtggaaagcgtgtcctgtcagcagcgcctgctcagcctcgccaaaattcaacgctttttcacgcagagcggcccagtcatgacgggcatcaattgcctgttgcgtatggacatggctttccagcacgcgctggtggaaagtttcgcagaggggaacgggcagaaacagttgatggcgtagcttatcaataataagccgggagagagtggtaaagtcgacaggataactgcctgatgccgtgaccagacgtgcaggaaatgcaaagcggtgatgctgggttggggagaaataagccactctgaaatggagcgatttctgctcatccagcgggatgagcaattcgtctggcgggtattctgtcagtttccagtctgtggtttcacgaatcagtgcattcaggaagcactgcgcagccacatctgtggctggtttttcagagggcagggtcatagtcaaacagctcccacacagtaaaataataacaattatgtcgataatgattctcattatcaacaataaatgttattgtcagataaattaattttacaaataaacacaattaatacatggagttgaaacattataatgtcaccagggatcgaagatacgccccaaaaaacactgtcctgctggccacttgcgttcagtgccgggcttctcggtatcggacagaacggtctgctggttgtgctccctgttctggtcatacagacaaatctgagtctgtctgtatgggctgccctgctgatgcttggctcaatgctgtttctgccatcgtccccgtggtggggaaagcaaatttcccgtactggcagtaaacctgtggtgttgtgggctctgggaggatatggcataagctttaccctgctagggctgggaagcgtgctgatggctaccagcgccataacaacagcggtgggactgggaatattaatcatcgcccggatcgcctacgggctgaccgtgtcggcaatggtgccagcctgtcaggtctgggcattgcagagagctggagaagggaatcgcatggccgctctggcaaccatcagctccggcctgagttgcggcaggctattcgggccgctgtgcgcggcagcaatgctggccattcatcctctggcgccactggggctactgatggcagcaccagtgctggcgctgctgatgctgctgcggttgcccggcacaccaccacagcccacaccggagtgcaagagcgtcagtctgaagcgggattgtctgccttatctgctttgcgcaatattactggctgcggcggtgagcatgatgcagcttggactttcgcctgcccttactcgccagttcgtcacggataccaccgccattagccaacaggtggcctggctgttgggtctgtccgcagtagctgcgcttatcgcgcagttcggggtactccgtccgcagcgcctgactccggtggccctgctcctgagtgccggagtgttgatgagtggtggtctggctatcatgctctccgaacagctatggttgttttacccgggctgtgcagtgctgtcatttggagcagctctggcaacacccgcttatcaacttctactgaatgataagctggctgatggcgcaggcgcgggctggctcgctaccagtcacacacttggctatggactgtgcgctttgctggtgccgctggtatcgaaaacaggtgtcgcaatcgcgctgattatggcagcattatttgcaactatattatttaccattgtgtctgtatttatctggcattaccgtactatcaaataaagatatgatcatcaccttactggagtaaatcagaggatatgagagaggacctgcgtctgatgaaagcatgtcaggcagtgttctggcttgctgcccccgcccatcaggtatagtgaattcaaccagttgctgcggtgtaatctccatgattctttcgtgcaacaacctatgatcccgtttaccattaatattcagcgttgctctgttattaaatttcattctgacaagccagtcagcttttattccgggagtctgctctgcgcgttcaaacaggtcataaaaatcgccttcacgatcagaaattgacaatacatgggtatcagggcattggcgagccagttctgttgctttattatatccttcaacccaacgccaggtttctttttcactgacatgttttttatgaagtaaatcattgcagatttcttgtcgggtatttttactggtttttaattcatccctgaaccactgatagtcatcataaacaccgaggcaaacacctgactcactgatgacgagttgaggatgaagaaataagtttctttcatctttatgttttttgtgaccaactccttgtttttctttctgaccagaataattaagttctgttgtatcctgtaaaactaaaactcttttaaactgctgagctctttcagtgatattttctttgtgaggagccataattttattagcagagactttatcgtttgaaaaacaacgataagctgcctttgtttcactccaggtacggcaggaaacaggaatactttcttctggtgaacgactgaggctattgaggatatgttttactcttttatcaagtcttgagtcccctatatccagtgattttagctcctgaataacccagttttccataacacctctgaaataatctctgtcttttcaatataatactattatttcaacttgtgggtaagggtatgagatgcgaagtgatgatcgatagtgatgcgaataagtgttcgattcagatgcgattatgcaatatgattttatgtgtgttgcttaattatcatatttcttgcccgttccccgccgcgcagatccggtttccggctgaagtggatacagacctgatttgttgctgagtatcggtaaaagtgcggcttataagctattctgaaacatggcaagtgaatctgggcggtataattccggcaaatgtcatctgtatttaaaggacgtgtgagtatgaaatttctggaatgtgctgtccgggatgtgatttatgggatcaatgtccgtattgtcaaaccggtcaacatttatgaatgtgaactcagggacaacgtgtttgtcggccccttcgttgagagtaaggcagtatgactttccgtgagacagatgctggccaacgtgggatatttaacgcgggttaacatcgttgtcagagccgcatgggtgagctgttgctacaccccggtatttccaccacggaggccagcatgaacaacaataacacattgtacgtcgggttagatgttcacaaagaatcgattactgtcgcttatgctatcaattcagaacctgttgaactgatgggtaaaattggcacatcacctactgatattcagaatctttgtaaacgtctcaggtcaaagtcatcacaggtcagtatcgtttatgaagcggggccctgtggttatggactttatcgtcggctggtgaaatccggttttgactgcatggtctgcgccccctcacttatcccgaaaaaaccgggggagcgggttaaaaccgatcgccgtgatgccatcagacttgtgcgttcactgcgtgcaggagatctttctgctgtctacgtacccggcattgaagatgaggcattccgggatttggcccgggcatgggcatctgcccgcgatgatttacggcatgcaaggcaacgtctgaaatcgtttcttctggttcatgggggccattatgtcggacgagcagattggggccctgcacaccgacgctggctcagcaaatactcattcgaaagtccctggcgacaattagcttttgacgaacaccgtcgtacaatagaagaccggcaggcacaatgtgaacggctggaatccgccctgaaggaggccgttaccgaatggaggctgtatccggtagtagaggcgctgcaagccatgcgagggattcagtttattactgcggttggattaatttctgaactgggtgatctgacccgttttgaacatccacgacaactgatgtcatggtttggtatcacgccatcagaatattcatcgggtggaagcagacatcagggcagcattaccaaagccggaaacagctatgccagaaagctattggtcgaggcagcgtggtgaggtgtactggcaatagcggacactaccatttgttctttttttaagcagccatctgatgatatttttccctgaaggctgccggggagatattccccagacgagagtgacgacgctgacgattgtagaaaatctcaatgtattcccgtattactgagatggcttcatcccggttattaaaacgatagtggctcaggctctcatttttcagcgttccccagaagctttccatcggagcgttgtcgtaacagttacctttacgcgacattgatgttttcagaccagactgctcctgtatgacccggtaatcgtatgcgcagtactgtgaacctcgatcagagtggtggattagcccggcaggtgggcgctggctcctgagcgccataaacagggctttacctgtcagctcttttgtcatgcgctctcccatggcgtagccgacaatttcgcacgtataaacatctttgatgccagcgaggtacaaccatccctcctgtgtggcaacatacgtcaggtccgccacccagacctgatttggtgctgtaggagcgaacgtctggttcagcagatttggcgcaactggcagattgtggttcgagttcgtagtcgctctgaacttgcgtttctgcttacagcgtagccttagctccttacgaagacgtgccagtcggtcacgaccaacgatgatgccattctctgccagctccgtctggagccgccgggttccatatgtttcgcgagtgcggatatgtgccaccttaatctccagttttagccgctcatcactttgttttctgtctgagggttcatgctgtacccagttgtaataaccgctcctggatacaccaaatacctgacacatcgcttcaatgggaaattgttgtcgccattgttcgattaacgcgtatttttcagcgactcctgtgcaaaatacgctgttgctttttttaatatatctcgctcaaggcgagcttcatttaacgccttacgcagttgcagaatttcagattccagttcagccaccgtgcgggaaccaggagtaccgagcccttttctggcggcggtaacccattgtcctaaagtgccttcaggaagagataatcgggaagcgccttcactgatcgaaagttgattttcaagaaccgttctgacagcttcggctttgaactctttagagtaacgttgggtttttctgctcattattagctccttctgatgccattctatttcaggaaggagtgtccgttaaactcaggctacctcactacccacccgataaaaagcggtgtaacgttcagtgtatttataagcattggctttggttccttctgatgttaccgctgagggaataacttctgtaaccagtttattcagacgtggagcatggaagtcaatagaagggtggttattacggtcaacaagggaatatgtatttttcccattaccaaagctcacactccgatatcctccgttatgctttacgctgacgatatactgaggcgatacaagcgtagcaacgccatttgagctcacactgctgaaatcggccattggggctttacccagtcttcccacaagttttccgtccttatcatataccggaatatcattggcaccaggtacaaaaagccctttgttttcggcgaaatcacgataaatctgataggcaatatcggaacggacaatacccgcctgggatatctgagagtaacacagacagattgctggaatgccagccagaagaatatgcgttaatcttcggcatgtcttttttattaccctgcgggcaagttcagagacagcaataagccccccggtgacggggcaatatttaagagaataaactttattcactatggattctccatgatgtttacaagggatataaaagtaaaatagctgaagaagctaatgataacccgacgttatcaccagaaaggaaaatatagttactgcattaatgtgtttttgtgaactgaaccgccccgggtttcctggagagtgttttatctgtgaactcaggctgccagatcatcatttccgatggaagcataataagctttttctgcttctgccggtgggatatggcccagcctttccagcaatcgtcgattgttataccagtccacccacgtgagtgtggccagctccacttctgtccggtttttccagctcttacggtgtattacctccgctttgtaaaggcccttgatgatctctgccatcgcgttgtcatacgagtcaccagtactccctgttgatgccagcagttttgcttcttttagtcgcgccttataggccagtgacacatactgagagcctttatcgctgtgatggatggtgccagacgggcgacgggcccacaacgcctgctccagtgcatccagcacgaatgtcgtttccatagacgatgagactcgtcaccacacgatgtatccggcaaacacatcaatgatgaacgccacatagacgaagccctgccatgtgctgacgtaagtaaaatcagccacccacagctggtcaggtcgttctgccacgaactgacggtttacgcggtcgcctgcggcaacggctttccggctgatggtcgtacggacctttttaccccggagaacaccggcaagtcccataaccgccatgagacgtgccacagtgcatctggccactctgataccttcccgtaacaactgacgccagactttacaccgtataccttgtgattttcatcgtatacgcgctgtatctctttcttcagccagtcatcgcgctgcgcacgggcactgcgtttatccggatgatgtcgctgttgctgacagtggtaatacgttgacggggcaatatgcagttcgctgcatagcggtccgaccccgtactgctcacgcagcttatccagcagtggcatcattttttccagaggcggtcaaactccgccttcgcaaaataagcggaagcctggcgaaggatatcgttactgcggcgcagttcacgattttcacgctccagctctttcagacgctgacgttcagcggtggtgagccctccatcaccgcccccggtatcccgctcatgctggcgaacccggacacgcagagtctccggcgtacagccaatctttggagcaatggaacaaattgtcgcccattgtgagtcatattcgccctgactttccagaaccatacggactgcccgttgacggacttcgggggaaaaacgagtatttttagtcatcctgtttacctctttctcaggaagtttagtctccaggattcccggggcggttcagttcagaacacaagcacattcaacagtacgtcaggactattgatttcataacagcgaatacaattttttactgtttataatggctacctgtgttggacggggtagactggccccctgaatctccagacaaccagtatcacttaaataagtgatagtcttaatactagtttttagactagtcattggagtacagatgattgatgtcttagggccggagaaacgcagacggcgtaccacacaggaaaagatcgcaattgttcagcagagctttgaaccggggatgacggtctccctcgttgcccggcaacatggtgtagcagccagccagttatttctctggcgtaagcaataccaggaaggaagtcttactgctgtcgccgccggagaacaggttgttcctgcctctgaacttgctgccgccatgaagcagattaaagaactccagcgcctgctcggcaagaaaacgatggaaaatgaactcctcaaagaagccgttgaatatggacgggcaaaaaagtggatagcgcacgcgcccttattgcccggggatggggagtaagcttagtcagccgttgtctccgggtgtcgcgtgcgcagttgcacgtcattctcagacgaaccgatgactggatggatggccgccgcagtcgtcacactgatgatacggatgtgcttctccgtatacaccatgttatcggagagctgcccacgtatggttatcgtcgggtatgggcgctgcttcgcagacaggcagaacttgatggtatgcctgcgatcaatgccaaacatgtttaccggatcatgcgccagaatgcgctgttgcttgagcgaaaacctgctgtaccgccatcgaaacgggcacatacaggcagagtggccgtgaaagaaagcaatcagcgatggtgctctgacgggttcgagttctgctgtgataacggagagagactgcgtgtcacgttcgcgctggactgctgtgatcgtgaggcactgcactgggcggtgactatcggcggcttcaacagtgaaacagtgtcagcgccagtgatataagacggtaattcgccatttggattgtccgctccacccaacatgttgtttccttaaggttctcacaccagaaaggacatcaacatgctgagcagagaggacttttacatgataaagcaaatgcgccagcagggcgcgtacatcgtcgatattgcgactcagattggttgctctgaacggacggtcagacgctacctcaaataccctgaaccgccagccagaaagacccgccacaaaatggttaagctgaaaccgtttatggattacatcgacatgcgcctggcagagaatgtctggaatagcgaggttatcttcgcggagattaaggcaatgggttatacgggcggacgttccatgctgcgttactacatccagcccaaacgtaaaatgcgtccgtcaaaaagaacagttcgcttcgaaactcagcctggataccagctccagcatgactggggcgaagttgaggtggaggttgccgggcaacggtgcaaagttaactttgcggttaatacgctggggttctcccgcagcttccatgtcttcgccgcaccaaaacaggatgctgagcatacctacgaatcactggttcgcgccttccgctacttcggtggttgtgtgaaaacggtgctggttgataaccagaaggctgcggtgctgaagaataacaacgggaaagtcgtgttcaactccggattcctgttgctggctgaccactataacttcctgccacgggcatgccgtccacgcagggccagaacaaaaggtaaggttgagcggatggtgaaatacctcaaggagaacttcttcgtccggtaccgcaggttcgacagcttcactcatgtcaatcaacaactggagcaatggatagccgatgtggctgacaaacgggagcttcgccagttcaaagaaacgccggaacagcgcttcgcgctggagcaggaacatctgcagccgttaccggatacagacttcgataccagttacttcgatatccgccatgtgtcctgggacagctatatcgaggttggtggtaatcgttacagcgttcccgaagcgctgtgtggtcagccggtatcgatacgaatatcgctggatgacgagttgcggatctacagtaatgagaaactggtggcctcacatcgcctctgttcagcatcgtctggctggcagacagtgccggagcatcacgccccgctctggcagcaggtcagtcaggtggaacatcgaccactgagtgcctatgaggagctgttgtgatgcatgaactggaagtcctgctgagtcgcctgaaaatggagcatctgagttatcacgttgaaagcctgctggaacaggcagctaaaaaagagctgaactaccgggagttcctgtgcatggcgctacagcaggaatggaacggcaggcatcagcgcggtatggagtccaggctgaagcaggctcgtctgccgtgggtcaaaacgctggagcagttcgactttaccttccagccgggcatcgaccgtaaggttgtccgggaactggctggtctggcgttcgtggagcgcagcgaaaacgtgatcctgctgggccctcctggtgtcggaaaaactcatctggccatagctcttggcgtgaaagcggtggatgcgggacatcgggtactgtttatgccactggacagactgatcgcgacactgatgaaagcgaaacaggaaaaccggctggagcgtcagctacagcaactgagttatgcccgggtgttgatcctggatgaaataggctatctgccgatgaacagagaggaagccagtctgttcttccggctactgaaccgtcgatatgaaaaagcgagcatcatactgacgtcaaacaaagggttcgcagactggggagaaatgttcggagatcacgtactggcaacagcgatcctggatcggctgctacatcactcaaccacgctgaatatcaaaggagagagttaccggttaaaagagaaacgtaaagctggagtgctgaccaaaaacacaacgccaatcagtgatgatgaaatggtggaaagcggacagcatcagtaacgaaagtatttagcgggcatgaaaatggcaaataacggtcaaacatcgtggcgttgacaacagtacaggacgtcatgctgggagcggtggaacgccgcttcggcaacgatcttccgtcgtctccagtggagtggctgacggataatggttcatgctaccgggctaatgaaacacgccagttcgcccggatgttgggacttgaaccgaagaacacggcggtgcggagtccggagagtaacggaatagcagagagcttcgtgaaaacgataaagcgtgactacatcagtatcatgcccaaaccagacgggttaacggcagcaaagaaccttgcagaggcgttcgagcattataacgaatggcatccgcatagtgcgctgggttatcgctcaccacgggaatatctgcggcagcgggcttgtaatgggttaagtgataacagatgtctggaaatataggggcaaatccacggggataccagttcaaccgaaaacgccagaggaggggattacccgctggcagggtaaatctgtggtttttgatgccagctataacgtgtttgacgataaagtattacgaaagaactttaatgagttcatggagtaattcgttaaagtaatttacaacgctatccttttgcaaaggaaactttcagaaaataaccccagggtaatcacctggggaaggaacacagtgttattattggataataaattattacttgttttaaagttacactaatgcaatatctactgatactggatgcttgaatgtttcatccctgctgcggaaaagggcaatatccagggccagatatattcaccgttcatatttctgcatttctgtacaatttcctcagaaagtgtcttgtcaattcttttccacaggtgctcctgctgtcttaaaatactttcgcatatttcgaaatcatcttcctgaatcagcatttcggcgcatttaatgatttctgatcgttcatgcagcacggaggaatggttatagagccagtttacaaacagcaatgcttccggatattgtccccataatggtgagtatgttgcatagtaatcttctgccgtatccagagagccggagaagtcatgccacacagcaagtggaaatggatgcagatttccgcacagcatttctgcgatgtaagtgtttgtggcaaagccatggcgaaaagctgtggcggccttaacatgttccccgttcagaaaatgcaggagaccgagttcataccagtaaggtgaaaattcatcagcatgctctttcagtacactgaaggctcgctcatgatcgccggtgcgtaacagctctgaacccaacaaccagcgagccccctgattatcttcaggattgtatgccagtattttatcagtgagcataaccgcatcctgatggcgctgtaagtgcacatttgcgagaattgctgcataaagcgcgcgcagataaggccggttttcgggatgcatccagattatttcaccacagaaactttccgggatgatacgattacctgccgccagtcctttaagagaggcgttcagtgccttacgcggggcattctgttccagaaatgcatatgccagatgagcgtgtatatcaataaagtccggctcccgttgagcaaggcgtcggagtttgttgatgtaactcgtctcgctgatttcatcagcgtcgtatgcatcaagcacttcttcaaactcccccagcaatgggccaaaccaggtatccgaaaatacgaaataacccttgttatcgtgcacttcaaagcataatctatcgttcatttctgagcctgtaaaacatgtggtgatatagtctgagagcataaaagttgagattctgtgtatcaagtcctgtcttggcaccgaatgaatattgcttacgaagccccttcatgctttccttgagaacaataattttatctttatgtgaatctcattttttataatgatgtcagatgattgaaatgctaaattatatctgaatcaacttttcctttgctaaaggtatcgaaataactgcaaggctgtattttgtaattgccaatttaaaaatgtcaatttgtttttaattatgtttttgtaataagtttgaagacgcaaaaaaataatataataacaaaaatcctccagccttgtaggccagaggataaaatacttaattgaggaaaatatcagggaaaagtatttctgacttaactttcccggctggagagtgaatcaatgtaatcagcgtaccattgcatcatttcacggcggccatcgagatacagggcatgattataggtacccctgatggaatttttatccacatgagctaactgcatttcaatccaggcggaattaaagccttgttcatgcagaattgggtaatgactccaacttattgatagtgttttatgttcagataatgcccgatgactttgtcatgcagctccaccgattttgagaacgacagcgacttccgtcccagccgtgccaggtgctgcctcagattcaggttatgccgctcaattcgctgcgtatatcgcttgctgattacgtgcagctttcccttcaggcgggattcatacagcggccagccatccgtcatccatatcaccacgtcaaagggtgacagcaggctcataagacgccccagcgtcgccatagtgcgttcaccgaatacgtgcgcaacaaccgtcttccggagactgtcatacgcgtaaaacagccagcgctggcgcgatttagccccgacatagccccactgttcgtccatttccgcgcagacgatgacgtcactgcccggctgtatgcgcgaggttaccgactgcggcctgagttttttaagtgacgtaaaatcgtgttgaggccaacgcccataatgcgtgcagttgcccggcatccaacgccattcatggccatatcaatgattttctggtgcgtaccgggttgagaagcggtgtaagtgaactgcagttgccatgttttacggcagtgagagcagagatagcgctgatgtccggcagtgcttttgccgttacgcaccaccccgtcagtagctgaacaggagggacagctgatagaaacagaagccactggagcacctcaaaaacaccatcatacactaaatcagtaagttggcagcatcaccgcagaattgtactcatggtgtgtctgaaaccgtgccctgtgagtcttcccttatatccaagtaattcaattacttggttaatgctttccttactaattggtttgcggggatcatttctaccgataaagactaggggatgatgttttgagattggttcaagctgcttaaatagcataatgacctgctcagagagcggcacaatatgaggtcgcttcatcttcattacttctgccgggatctcccacaattttgtctcaaaatcgatatcttcccagcgtgcaaaacgcagttcttgtgttcgtacgccggttaacataatgatctgagtagctgtcttagtgattatacttccggtataacccgccagatcgttgaggaagtggggaagttcattagcagtaagaaagggaaaatgtacttttttcggtgtagctaaagcactggcaagatcgggggctgggttatagtctgcccggccagtaacaattgcatagcggaacacctcaccacagcgctggcggaccttgcgcattttctccagagctccacgtttttccattttacgcagtgcttccagtaactccattggtttgatttcggcaatagggcgcttgccaatgtagggaaaaatgtctttttcaaaggtatcaatgatttcatcacgatagcgtaatgaccaccgatcagcttttgactggtgccattcgcgagcaatagcctcgaacgtatttttcagactcatttgctgcgcgattttttcttccttttttgcctcccctggatcgcctccagcagcgaggagtttcctggcttcactgcgtttctcgcgagcatcggctagcgttacatcggggtatacgccaatagaaagcatcttttctttaccagcaaagcggtacttcatgcgccagtatttagaaccattagtgttaatcagtagatacataccgccgccatcagcaagcttatagggtttgtctttgggttttgcggttttcactttgatatcggttaatgccatgacatcctccggcttttgatgaattcatgttcctgagggggatttctgccagtaactaacctgatacccccaatacaccccttgtataacaaagatattgttaaaagccgttgttatgtatcacatttttcctattatgggggtgcttgtatttcaataggaaataacaccccctaaagtacccccaaaagaaacttgatatggggtgaagtaggttgacctcaggatacaaataaatactgatatacaagggattagaagagatttattgacattgggagagttcagaagaggtaaactggcggaagatcacaggagtcgaacctgcccgggaccgctggcggccccaactggatttgaagtccagccgcctcaccggagacgacgatcttccgcgcctcgattgctacatggaggcggggcgcattatagctacttccttgagtttctacatcccccagatcagttttttccgcctaatacacgcagcgtattatcacgaaagcattataactcatataaaacccatattttacaatgatatatgagcggaattaacgctaccacgatcacataaaacaagaatcataaattaataaccagatatcggaatattcgctctcacagggatggtttacaaaatgcgttatcggtctcagcacccctatagcatcaaggaaaagcagatgaagagtgaagtgttgtccgttaaagagaaaattggttatggcatgggagacgccgccagccacattattttcgataacgtaatgttatatatgatgttcttttataccgatatttttggcattcctgccggatttgtcggaaccatgtttttggtcgctcgtgcactggatgcgatttccgatccttgcatggggttgttggccgatcgaacgcgctctcgctggggtaaatttcgtccgtgggtactgtttggcgcactgccattcgggatcgtctgtgtactggcctatagcacgccagatctcagtatgaacggcaaaatgatctatgcagcaattacttacaccctacttaccttactttataccgtcgtcaatatcccttactgcgcattgggtggtgtaatcaccaatgacccgactcagcgtatctcgctgcaatcctggcgttttgtgctggcgaccgcgggaggcatgctttctactgttctgatgatgccactggttaatttaattggcggtgataataaaccactcggtttccagggcggtatcgcggtcctttccgtggtggcattcatgatgctggcattttgtttcttcaccactaaagaacgcgttgaagcaccacctacaacaacgtctatgcgggaagatttacgtgatatctggcaaaacgaccagtggcggattgtcggtttactaaccattttcaatatcctggcggtgtgcgtacgcggtggggcgatgatgtattacgtcacatggattttgggcacgccggaagtgtttgtcgcttttctcaccacttattgcgtgggtaacctgattggttccgcactggcaaaacctctgaccgactggaaatgtaaagtcactatcttctggtggacgaacgccctgctggcagtgattagcctcgcgatgttctttgttcccatgcaggccagcatcactatgtttgtcttcatcttcgtgattggtgtgttgcatcaactggtgacacctatccagtgggtaatgatgtccgataccgtcgactacggcgagtggtgcaatggtaaacgcctgaccgggatcagttttgctggcacgctgtttgtgctcaaactggggttggccttcggcggcgctcttatcggctggatgctggcttatggcggatatgatgcggcagaaaaagcgcagaacagcgccacggtgatgctgccaacttactgatttagtgtatgatggtgtttttgaggtgctccagtggcttctgtttctatcagctgtccctcctgttcagctactgacggggtggtgcgtaacggcaaaagcactgccggacatcagcgctatctctgctctcactgccgtaaaacatggcaactgcagttcacttacaccgcttctcaacccggtacgcaccagaaaatcattgatatggccatgaatggcgttggatgccgggcaactgcacgcattatgggcgttggcctcaacacgattttacgtcacttaaaaaactcaggccgcagtcggtaacctcgcgcatacagccgggcagtgacgtcatcgtctgcgcggaaatggacgaacagtggggctatgtcggggctaaatcgcgccagcgctggctgttttacgcgtatgacagtctccggaagacggttgttgcgcacgtattcggtgaacgcactatggcgacgctggggcgtcttatgagcctgctgtcaccctttgacgtggtgatatggatgacggatggctggccgctgtatgaatcccgcctgaagggaaagctgcacgtaatcagcaagcgatatacgcagcgaattgagcggcataacctgaatttgaggcagcacctggcacggctgggacggaagtcgctgtcgttctcaaaatcggtggagctgcatgacaaagtcatcgggcattatctgaacataaaacactatcaataagttggagtcattacccagcgccacgattagcatcattattgcgctattcacgattgttccggcgatctgttatttgctgagcgcgattatcgctaaacgctactactcactcacgacgcacaatctgaaaaccgttatggaacagctggctcagggtaaacgccgttgccagcaacaattcacctctcaagaagtgcagaactaaggaacggcaatgaaaattagcgatggaaactggttgattcaacctggcctcaatttgattcacccgcttcaggtgttcgaggttgaacagcaggataatgaaatggtggtctatgctgccccccgtgatgtgcgtgaacgtacctggcagcttgatacgcctttatttacgctgcgctttttctccccacaggaaggtattgtcggtgtgcggattgagcattttcagggggcgctgaataacggtcctcattatccgctcaatattttgcaggacgtgaaggtcacaatcgaaaacacagaacgttatgctgagtttaaaagtggcaacttaagcgcgcgtgtcagcaaaggtgagttctggtcactggattttctgcgcaacggcgaacgtattaccggtagtcaggtgaaaaataatggctacgtgcaggacacgaataatcaacgcaattatatgtttgagcggcttgatcttggcgttggcgaaacagtttacggtctgggagagcgctttactgccctggtgcgcaatggccagacggtagagacctggaaccgggacggcggcacaagtactgaacaggcgtataaaaatatcccgttctacatgactaaccgtggttatggggtactggtcaatcatccccagtgtgtctcttttgaagtgggatcggagaaagtctccaaagtgcagttcagcgttgagagtgaatatctcgaatactttgttatcgacggcccgacgccgaaagcggtacttgatcgttatacccgctttactggtcgtccggcgctgccgcccgcgtggtccttcggcctgtggctaaccacttcatttaccaccaactacgacgaagcgacggtaaacagctttatcgatggtatggcggaacgcaatctgccgctgcatgttttccactttgactgtttctggatgaaagccttccagtggtgcgattttgagtgggacccgctgactttccctgacccggaagggatgatccgccgcctgaaagcgaaagggctgaaaatctgcgtctggattaacccctatatcggtcaaaaatcccccgtctttaaagagttacaagagaaaggctatttactcaaacgcccggacggttcgctatggcagtgggataaatggcagccaggtctgtaatgccgatcagttaaggatcagttgaccgatccagtggctgtgtaagaatccggaaacgctcacttgtttccggatttttttatgcacattggacaggctcttgatctggtatcccgttacgattctctgcgtaacccactgacttctctgggggattacctcgaccccgaactcatctctcgttgccttgccgaatcaggtactgtaacgctacgcaagcgccgtcttcccctcgaaatgatggtctggtgtattgttggcatggcgcttgagcgtaaagaacctcttcaccagattgtgaatcgcctggacatcatgctgccgggcaatcgccccttcgttgcccccagtgccgttattcaggcccgccagcgcctgggaagtgaggctgtccgccgcgtgttcacgaaaacagcgcagctctggcataacgccacgccgcatccgcactggtgcggcctgaccctgctggccatcgatggtgtgttctggcgcacaccggatacaccagagaacgatgcagccttcccccgccagacacatgccgggaacccggcgctctacccgcaggtcaaaatggtctgccagatggaactgaccagccatctgctgacggctgcagccttcggcacgatgaagaacagcgaaaatgagcttgctgagcaacttatagaacaaaccggcgataacactctgacgttaatggataaaggttattactcactgggactgttaaatgcctggagcctggcgggagaacaccgccactggatgatacctctcagaaagggagcgcaatatgaagagctcagaaaactgggtaaaggcgatcatctggtgaagctgaaaaccagcccgcaggcacgaaaaaagtggccgggactgggaaatgaagtgacagcccgcctgctgaccgtgacgcgcaaaggaaaagtctgccatctgctgacgtcgatgacggacgccatgcgcttccccggaggagaaatggcggatctgtacagtcatcgctgggaaatcgaactgggatacagggagataaaacagacgatgcaactgagcaggctgacgctgagaagtaaaaagccggagcttgtggagcaagagctgtggggtgtcttactggcttataatctggtgagatatcagatgattaaaatggcggaacatctgaaaggttactggccgaatcaactgagtttctcagaatcatgcggaatggtgatgagaatgctgatgacattgcagggcgcttcaccgggacgtataccggagctgatgcgcgatcttgcaagtatgggacaacttgtgaaattaccgacgagaagggaaagggccttcccgagagtggtaaaggagaggccctggaaataccccacagccccgaaaaagagccagtcagttgcttaactgactggcattacagccaggtctggcgatttatgactttaccaatccggatgcctgcaaatggtacgccgacaaactgaaaggtctggtcgcgatgggcgttgattgctttaagaccgactttggcgaacgtatcccaactgatgttcagtggtttgacggttccgatccgcagaaaatgcataaccattatgcgtacatctacaacgaactggtgtggaacgtgctcaaggacaccgttggtgaggaagaagctgtcttgtttgcccgctcggcctccgtcggtgcgcagaaattcccggtacactggggtggcgattgttacgctaactacgaatcaatggcggaaagcctgcgcggtggtttgtctattggcctttcaggttttggcttctggagccacgatatcggcggctttgaaaataccgcgccggcacacgtttacaaacgctggtgcgcgtttggtttgctctccagccatagtcgtttacatggcagcaaatcttatcgtgtgccgtgggcctacgatgatgagtcctgtgatgtggtgcgcttcttcacgcaactgaaatgccgcatgatgccgtatctgtatcgtgaagctgcgcgtgcgaaagcgcggggtacgccgatgatgcgggccatgatgatggagttcccggacgatccggcttgtgattaccttgaccgtcaatacatgctaggcgacaacgtgatggttgctccggtgttcactgaggcgggcgaggtgcagttctacttgccggaaggtcgctggacacacctgtggcacaacaatgagctcgacggtagtcgctggcataaacagcagcacggcttcctgagtctgcccgtttatgtgcgtgataacaccctattggcgctgggcaacaacgatcaacgtcccgattacgcgtggcacgaaggcacggcattccatctctttaatctgcaagacgggcatgaagctgtatgtgaagtgcccgctgctgacggttcggtgatctttactctaaaagcaacacgtactggtaacacgattactgtgactggtgcgggcgaggcgaggaactggacactgtgcttgcgcaatattgtgaaagtaaatggtctgcaaggcggttcgcaggctgaaagtgagcaggggctggtggttacgcctcaagggaatgcgctgacaattacgttgtaatctattgaagaatgccgggtacgtctgagtcgtacccggcgagattgatgtttactgcaccagctctgccgatgtaacttcaccgctggaaacgacgcccgcattcatggtttgagtcacttggtgctttgcggcgttcacggcatgcaattgcccgctaaccgtaggtttcaacgggacattggcctgaatatcgccactggcggtaagctgaatattgccgtcgccagtcaacggtaattcaggccatccccactgttgcaaaatattcaccggcacaccgcgtccattcaggctgatatgtgtctgacgttgtggcgtttgtgaaacactggcggtggcttccagaatgcctttttcagtaaatgcactcagttcgctgatattcaccgtgctgctgttggcggttagcgccagcgacggacgacggacatcaacacgattaaacgtcgcggcggcggcattcagattcgccgagccactccagacgccccatttatgatcggtaaccagcgtcaggttggcaccgtaaccatcgagcgcggtgagctgccacgggaagtcagggtcgatatcaatgatcagattgcggctggcgctaaatctcttcagttgcaggctgtttaaccaaccgggtgtcgtttccatccacaactgttgccagtttttcggcaaggtatattccagtccggcaattgccgcatcatcaaggatcaacgttttcccgtcacgcagccagttccctgacgttctgaccatacccccttcccagcggctggtgaactggcgcagcgctacgccctgcggagaaaattccgcgtttataatcgggtcaaataaatgcagcgaaccataaatgaactcgctagcgttcatcgacagtttgccttcttgtgtctgccagtcatctttactgaaggtcatgttgcgcaagctgagatcgaggtcggtcaccgcccagtccggaccttgcaaacgagcatcgatcacttccaggcgaccaatctgcaacgacgggacagagcgtaatggcgcaaagaagtcggttagcgatttttcgctttgtagacggatatccgccatgcgcaggttttccacttgccagctgccgtcggcgttacgctgcgcgtttccggttaatgtcccgcgcgcgatgtcggcacccaggttagtcagcgtaacgcgatcgttatcaatactgccttcaatcagtacattggtggcaggaacatcattgagcgaaagcgatccggcactaaactgaatctgcgccttcgtacccagcactttaccggcttctggtgaccacggaaccacgccgccatttacccgctgcgcgctcagtttccattcgctattcgggctattaaacgccatatcacgcagttgcagacgatcggctttgaacggtagcggcgcggtctggtcggtgagattcagcgtcccgttttccagcaggatggtatcgacatggcgtggttcggtcagttgccgactacttagcgcaatgtcgacacttttggccaccagggtcgcgggctggccatcacgaccaaacgtgacattctccagcacgatatgagatggcgcggaaaaacggtgaaccatcgccccgaaggccagatgatagtcgctattctcggaaacccatgcgctgatatgttctgctccccagcgggtttgcagaagaaaatagaggccagcgatcgccactaacagagcgatgagaatgtagagaagcagcttcccaataaatttcatggtcttccatcccgtgaaatgcacataagggagttatgcacgatttacgcgcaatcctcaaggcgggaatggttaaagaggtgagactgcggcggtaattatcttaccgccgccagtgaattactgtttttctggtgggaaaatcagattcagcacgatggcagtaataccgcccgcggcgatcccggaggagagcaggtttttcagccattcaggggcaaactgcaaaatcagcggctgctgagacacgcccagaccaaccgccagcgacagcgcgataatcagaatcgcccgacggttcagcggctcacgagaaacgatacgcacaccggaggcggcgatggtgccaaacattacaagcgttgcgccgcccagaaccggttctggaatgtgttgtacaaaaccgctcactgccgggaacagacccagcacgatcaacatcagcgcgacgacaaaaccgacatagcggctggcaacaccggtcaactggatcactccgttgttttgcccgaagcaggagttcgggaaggtgttaaacaccgccgaaacaaacgagttcaggccgtttgccagcacgccgcctttcaggcgtttcatgtacagcggaccggacactggctgttcggaaacgtcagaggtcgccgtgatatcgccaatggtttccagcgaagtgatcataaagaccagcatcagcggcagcagcagactccattcaatgccaagaccgtaatagagcggcgttggcaccataatcagttcttgcgtcatcggttcgttgctttctggcaacatgcccataaaccacgccagcgcatatccggccgccatcgcaattaccagtgaggccacgcgtaagtaagggttacgttgacggttaagcaggataattaaggctaaaaccacgcctgccagcagcagatttttcggtgcgccgaaggtgttatcgctcatggctgcgtaaccgccgccaatggaggtcagccccacctgaattagcgacaggccgataatcatcaccacaacgccagaaaccagcggcgtaataatgcggcgcgccagatgcagaacgcgggagatcaccatctcggtgcaacttgccagcatcaacgtgccgaacaaagccgccatcatggtaggaacatcagcaccaccggttttcagcgcggtaccgcccataatcagcggggcaacaaagttgaagctggtgccctgaatagacaacagcccggagccaaccggaccccaggccttaatttgaataatcgatgccacaccggaggcaaacagcgacatactaataatgtgttgcgtgtcttgtgccggtaaacccagcgcctggcagattaatagcgctggcgtgatcaccgcaacgaacatcgccagcagatgctgacaggcggcaaacagggtttgaggaagcggcggacgatcttcaagacggtaaatcagttcgctgttttgagtctgcgcaaccggttgcgcattttctgactcgagggtggaaacagacatcgaaaacaatcccgtggtagcaaagcgggcattttagctgaccgaaagagaaaagcaaacgtttgccacatcctcatctaaatatttaaatgagataaatgcacttttttatataacttttggtatttttctgcttaaaatccatgccatttgttcattaacagctgagaatttgacccaggaaagcataactcgatacccgtcatagttcatgaagttgccactgcgcgatgaagtatgacgagtatgaaagagtgatgcggatacaaaggagtaactatgtttcatctcgatactttagcaacgcttgttgccgcaacgctgacgttgctgctcgggcgtaagttggtccattccgtctcctttttgaagaaatacaccataccggaacctgttgcgggtggtttgttggtggcgctggcgctactagtactgaaaaaaagcatgggctgggaagtcaactttgatatgtccctgcgcgatccgttaatgctggctttcttcgccaccattggcctgaacgccaacattgccagtttgcgtgccggtgggcgtgtggttggcatcttcttgattgtggttgttggtctgttggtgatgcaaaatgccattggcattggtatggctagcctgttagggcttgatccgctgatggggctgttggccggttctattacgctttccggcggtcacggtacgggcgctgcgtggagtaaattgttcattgaacgttatggcttcaccaatgcgacggaagtggcgatggcctgtgcaacgttcggtctggtgctgggcggcttgattggcggtccggtggcgcgctatctggtgaaacactccaccacgccgaacggtattccggatgaccaggaagtcccgacggcgtttgaaaagccggatgtgggacgcatgatcacctcgttggtgctgattgaaactatcgcgctgattgctatctgcctgacggtggggaaaattgttgcgcaacttttggctggcactgcttttgaactgccgaccttcgtctgtgtactgtttgttggcgtgattctgagcaacggtctgtcaataatgggcttttaccgcgtctttgagcgtgcggtatccgtgctgggtaacgtaagcttgtcgttgttcctggcgatggcgttgatggggctgaaactgtgggagctggcttcgctggcgctgccgatgctggcgattctggtggtacagaccatcttcatggcgttgtatgccatcttcgttacctggcgcatgatgggcaaaaactacgatgcggcagtgctggctgcaggtcactgtggttttggcctcggtgcaacgccaacggcaatcgccaacatgcaggcgattactgaacgctttggcccgtcgcacatggcgtttttggtggtgccgatggtcggtgcgttctttatcgatatcgtcaatgcgctggtaattaagttgtatttgatgttgccgatttttgccggttaaccgatgaagcggcggtagaagtgccgccgcaacaaagacaaatgcctgatacgcttcgcttatcaagcctgcgtattgattcataatttattgaatttgtagggtgatgaatcgcatccggcaggaaggtagggtaacctgaaatggcggtcttctcactgccgccttttacgcattcgagtaacgttccgtctccggcatccagcgttctatcagggcttttgcctgttgtgggtaacgttcgtgaatatggcgtgccaggcgctgaacttccgggatcatcgcctgatcgcgcagtaaatccgccactttaaattcagcattacccgtctgacgcgtgcctaacaattcgccagggccgcgaatctccagatctttttgcgcaatcacaaaaccgtcgttactgtcgcgcagcacttgcaggcgaatttgcgccgttttagaaagcggcgttttgtagagtagcacgcagtgagaagccaccgcgccacgacctacgcgcccgcgcagctggtgtaactgcgccagacccagacgctcagggttttcgataatcatcaggctggcgttaggcacatcaacaccgacttcaataacggtagtggcaaccagcagatgtagctcaccttgtttaaacgacgccatcaccgcctgtttctcggctggtttcatccgcccgtgtaccaggccaacattcaattctggtagcgccagtttcaactcttcccaggtagcttccgccgcctgcgcttccagtaactctgactcttcaatcaacgtacaaacccagtacgcctgacgaccttcagtcatgcaggcgtggcgcacgcggtcaatgatgtcggtacggcgagtatcaggaatagcgaccgtagtcactggcgtgcggcctggcggcagttcatctatcaccgaggtatcgagatcggcatacgccgtcattgccagcgtgcgggggatcggcgtggcggtcatgatcaactgatgcggatggaagccttgctgctggcctttctcccataacgccagacgctgatgcacgccaaagcgatgttgttcgtcgataatcaccagcgccagaccgttaaactgcacctgttcctggaagatggcgtgcgtaccaacaatcatctgcacctgaccgctggcgatggcttcctgctgagacagtcgcgctttgcctttctgcttaccggcgagccagcccacttcgataccgagcggttcaaaccagttgcggaagttattggcgtgctgttcggcgagtaattcggttggtgccatcaatgccacctgtttgccgtgggcaatcgcacgcagcgcggcgagggcggcgaccagcgttttaccggaacctacatcgccctgtaccaggcgcatcatcggcacatccagcgccatatcgcgctcgatctccgccactacgcgtgcctgtgcgcccgttggcttgaacggtaaggctgcgaggagtttatttttcagcgcatcattggcgctcagcggctgggcatgaaaacgctgtgctccggcacgtaaggctaacatgctgaggttgtgcgccagcagttcttccagaatcagacgacgttgcgccggatgctgcccggtttccagatcgctaagctgtagcgtcggtggcgggcggtgcaaagtgcgcaacgcttccggtagcgtcatcattccttgtgacagttccggcggcaggagttcttcaatggcgcaggtgtcgagcagatccagcgcctggtcggttaatttacgcagcgtggcctgctttacgccttccgttgttggataaaccggcgtgagcgtttcctgtaattctggcgtgctgagatcgccctgcacgcggtattccgggtggatcatctccgcaccatatttaccgcgctttgcttcgccataagccagtacacggcggcccgtcgccaggctatttttcattgccgcgctgaaattgaaaaagcgcatggtgaggatgccggaaccgtcgctgatctggcaggtcatcatccgccgaccgccgaaggagatattgcagttcagcacttcgccttccaccgtggcataaacgcccggcagtagttctccgatggggtagagatgggtgcgatcttcgtagcgcaggggaaggtgtaagagtagatcctgcacggtatgcaggttgattttcgccagtttgttactaagtgctgcgccaacgcccgttagggaactgagtgggacagcatctaacaggcgacctttcatggcacttaccctgcagcctgcatagtagcccaccagtcggcatcagcttcgatctcgccttgctgattgacgtggggataaggcaggcctttgcgttttgcgactttcgccagcaccggatagccgccttcaaacaacaggcgttgttgctctgcttccggcaacatgctgttttcacgcaggtacatgcctgcattttgccgctgacgctgggcttcgtaaagaatgagggctgaggcaacggaaacattcagcgactgcaccatgccgatcatcggaatgatgatgtcctgatccgccagggccaatgcttcctgcgtgatgcccgttttctcctgtcccatcaaaatgcaggtcgggcgagtgtaatcaatttcgcggaaatcgacagcgttatcagaaagatgggttgccagaatctgcatgccctggcctttcagatgagcgacggcatcgccaatggtgcggtgtgttttcacctgtacccagctgttactacccgccgctgccgaagccatggtgcgcatgcggctaccaggccagacggcgtgaacttcatgtacgccaacggcatctgcggtacgaataatcgcagaaacgttatgaggtttgtggacctgctccatgcagacggtcagatcaggctgccgcctggcgagcatttcgcagatgcgtgcataacgtgttgggttcataaaacattaatttcggtttcgggtgactttaatcacgtctggcatcacgcggattttgcgcatgatattcgccagatgcacacggtcacgggcggtcagacgaataaaggcgctgtagacgcgaccatctttctcttccgtattcaaactttgaatattcgaagtcgtggtgttaattgccgccgtcaggtttgccagcgcgccctgatgattgaacatctccaccttgatttcggtgatgaactcctgcgccgtctctttatcccattccacagccataaacttctctggctctttctggtagccacggatattacggcaggattcatggtggatcaccagacctttaccggggctgacgtgggcgataatcgggtcgccaggaatagggcggcagcatttcgcaaaggtgatcagcacgccatcggcacctttaatgggcagatgtccgtggctttgggttgccggtggaatggaggcgtccccatgttgcagatttttcgcgaccaccacgctcattgcgttaccaagtccgatttctgccagcagatcgtcaagcgttgccagcttcatgcgatccagctcgcgctgaatattttcctgcgggatttcattcagcttacggctaccacccaaagcatggttgagcagacgacggcccaggcttacagaatcatcacgcttgaggtttttcagcaactgacgaattttggcgcgcgcttttgagctaacgacaaagttcagccacgcggcattcgggcgagcgcccggtgcggtaatgatttcaacggtttgaccgctggtaagcggctgcgacagcgggtaaggctggcggtcaacgcgtgcgcccacgcaggcatgaccgatatcggtatgcactgcataagcgaagtcgacgggcgttgcaccggcaggcagctcgacaattcgcccttccggtgtgaaaacgtaaatctcatccgggaagagatcggatttaacgctctcgataaattcaaacgaactaccggcgctctgttgcagctccagcaggctttgcatccagcgctgggcgcggatttgcgcggtggtgctggtttcgccgtgctctttataagcccagtgcgcggcaacacccatctccgccatctgatccatatcttcagtacggatctggacctcaaccggcacaccgtgcgggccgatcatcgaggtgtgcaaagactgatagccgttcgcttttggaatggcgatgtagtctttcacgcgacccggacgcggcttgtacaggctatgcatttgcccgagcacgcgataacaggtgtcggaatcattgacgatcacgcggaaagcgtagatgtccatgattgagtgaaaacgctgctctttgagcaccattttgcagtaaatcgaataaagatgcttttcgcgaccactgacgcggcacggtattcccgcttcctgcaaacgcccttcgatttcagaaagaatcttctggatcatctctttacggttgccgcgcgcggctttcaccacttctttgattacgcgataacggttgggatacagcgcctcaaaacccagctcttcgagttcggttttaatgtggtggatacctaaacggtgcgccagcgggctgtaaatttcgagagtttcacgggcgatgcggcgacgtttgtccgggcgaagtgagcccagcgtgcgcatgttgtgggtacggtcggcaagtttgatgaggatgacgcggatatcctgcaccatcgccataatcatcttgcgaaagttttcggcctgcgcctctttcttatcgcggaacttgagtttatcaagtttcgataccccctctaccagctcggcgacgcttttaccaaaaagctgttccatatcctggtaggtggcgggtgtatcttcaatcacgtcatgcagcagcgccgccatcagcgtttcatagtcgagtttcatctcggccagaatgcaggcaaccgctaccgggtgcgtgatgtagggttcaccgcttgaacgtgtttgcccctcgtgagcatcacgtgcaacgagatacgcctgccgcagacgcttgatttggtcttccggcaggtaggtttgaatcagttgattcaggctttcaaacagatacaagggcgacccgctttgtgattaacgacgaccttcagcaatagcggtaacggcttgtaattcagcggcttcctgctcttgctgttcctggcgttcgcgaacgtcgaggatctggttgttgatcagaccttcttcgatttcgcgcagcgcgattacagtggttttatcgttttcttccggtaccagcggatcctttccgcctacctgcatctgacgagcgcgacgcgcggcgaccagtaccaggtcaaaacggttaccaattttctctacagcgtcctgaacagttacgcgtgccatacttaaaaagctccacaggtgaagaaatgactgggcatgatactgaaatcaggttcagtctgccaacaatttgctgattaaagcgtcatgacgctgcttttggcggctcatgcgcagacgttcggcgcgaataatggtcttcaaatcggtcaacgcggtatcgaagtcatcattcacaatcagataatcatattcggcgtaatggctcatttctgcaacagcttgcgccatacgctttgcaatgacctcttcgctgtcctgaccgcgaccgcgtagacggcggtccagttcaattttggacggcggtaaaataaagatactccgcgcgtgcggcatcttctggcgaatttgctgcgcgccctgccagtcgatatcgagaaaaacatcgacaccggtcgccagtacttgctcaatggcctcacgcgaagtgccatagtaattaccaaaaacttctgcgtgttcgaggaacgcatctctgctaatcatttctttaaattcatcatgattaacaaagaaataatgttcaccgtggacttcaccaggacgcggttggcgtgtggtgtgtgaaacagaaacctgggtgtcatacaacggttgggtttttaataaagcctgaatcaggctggatttacccgcaccactgggggcagaaacaatataaagcgtgccttgagccatgagtatctttcgtatgtgattagcgaaataaagcctacatacgagcttattatacacggcgcggccatgtgacgtagcccttgctcacactttttgcgcaaagttgttgcgttttgcgtagctgcttccgcatttgcctgtcattcattgcaataaagacgattttcaggaagcgtcctcgcagactccgtttttgccactcggctttgctttcatcacgttgtatatctgcctgactatctacagcggaggtgatgatgaaagtatggatggcgatattaataagtatcttgtgctggcaatcatctgtgtgggcggtctgtccggcctggtcgccagccagagcacaggaagaaatttcccgcctgcaacagcaaataaaacagtgggacgatgactactggaaggaagggaaaagtgaggtggaagacggtgtttacgatcagttaagcgcccgtcttacgcagtggcaacgctgctttgggagcgagccccgcgacgtgatgatgccgcctttaaatggtgcggttatgcatccggttgcccatacgggtgtacgcaaaatggtggataaaaacgcattaagtctgtggatgcgagaacgtagcgatctttgggtgcagccaaaagttgatggcgttgcggtaaccctggtttatcgggacgggaaactgaacaaagcaatcagtcgcggtaatggcctgaaaggcgaggactggacgcagaaagttagcttaatttccgctgtgccgcaaaccgttagcgggcctttagccaacagtacgcttcagggggaaatatttctccagcgcgaggggcatatccaacaacaaatggggggaataaatgcccgcgcaaaagttgctggcctgatgatgcgccaggggaatagcgacacgctaaactcactggctgtttttgtctgggcatggccggatggaccgcagttaatgaccgatcgtttaaaggagctggctaccgcaggttttactctaacgcagaggtatacccgtgcggttaaaaatgctgatgaagttgcgcgcgtacgcaatgagtggtggaaagcgaaattacccttcgtcaccgatggcgtggttgtgcgagcggctaaggaacccgaatcccgccattggctaccaggccaggcagaatggttggtggcctggaaatatcaacctgtagctcaggttgccgaagtgaaggcgattcagtttgcggtgggtaagagcggtaaaatatcggtggttgcgtcactcgcacctgtcatgctggatgataaaaaagtccagcgggtgaatattggttccgtcaggcgctggcaggagtgggatattgcgcctggtgatcagatcctcgtcagccttgccggtcagggtattcctcgcattgatgatgtggtctggcgcggtgcagaacgtacaaaaccgacaccaccagaaaaccgctttaactcgttgacctgctactttgcttctgatgtttgtcaggaacagttcatttcacgcttagtctggctggggtcaaaacaggttcttgggctggatggcattggtgaggccggctggcgcgcgctgcatcagactcatcgctttgagcatatcttttcctggcttttattaacgccagagcaattacagaacacgccggggatcgcgaaaagtaaaagtgcgcagttatggcatcagtttaatctggctcgtaagcagccttttactcgctgggtgatggcaatgggaataccgttaacccgggcggcgcttaatgccagtgatgaacggtcctggtcgcaacttttatttagcacggagcagttctggcagcggctgccggggactggatctgggcgcgccagacaggttattgaatggaaggaaaatgcgcaaatcaagaagctgggcagttggctggctgcccagcagatcacaggttttgaaccttagtgaccttcgtggctgtagtaaaagaccggtaatcccagcttaagacgtagcgccagtaagcgggcaaaaaagccgaataccagggtggagataatcaccacatcatggttagaaacatagtgttgcagcgcgatgtacagcacggcggaggcaaatgagacaccggcatacaactctttctggaataccagtgggatgcgtttacagaacatatcgcgcaaaacgccgccaaacacgccggtggttaccgccgcgacaacggcaataattgggccgtgccccatatccagtgcaacctgtgcgccgatgatagaaaagaccaccagtccgagcgcatcgagcaccagaaacactttgcgcaggtaaggcattacaggagcaacgatagtggtgagtactgcggcggtagcgacgataatcacatattccgggtgtttgacccagccgagcggatagtggcccagcagaatatcgcgcactgaccctccgccaattgcggtggcggtcgcaataataattacgccaaatgtatccatgcgccgtcgtccggccgccagcgcccccgtcatggcttcggcagtaatgccaaccaaatacaaaatgtgtaacagcatggttctctccctaaaaatctgtctggcagggtagcgatttgtgcgtattgtcacgattgagattttttaaggtgagaggaaattgataacttgtagttatgtgaaatcgctattttctgtagtgtagatgcattcttctgacttcttgtctgagaaaatgcataagaaaaaataggttaaaattgaggggtggaaaagaaaggtgcaatgtttagccattgtgttcactgcacctggactttggcttacgcatcgggtatctcaattaagaaaaagagtttttagtttctgctatttcttctctgtaatttttacactgttttccaactgattgatgctgacctgcggggtcggcaactcctcaggcatggttccgccaagttcctgaatggtttgcctcaccttgctacccacgtcaaagtgtgtggtattagcttgctgttttgaatttacgccatcccgcttgagtttttcttctgtttgggtagctcgaaagagattagccgccagttctgttgaacccatatgatccaggatcttctgactctttttcagccccttccgctgatggatggctttctgatctaatccaccatacagcccccggtaaccatgattctgaaatatggcgaaatcgatagctgtcgctaccccagcttgctgcgctgcctcaactaattgtttgttatgttctttcaactcatttctcagaaaaagacgcttttcgtcttcacgaagttgcctgaaagcttcatcgtcagccagctcctgccgtcgggtctggatagcaaaataagtttgccctgccgcaataaccggtttcgcagggtcgccgttttgtactaccaggtaacaggcatagcgagagagatgaacatcttcaagttctcgttgagcccctgaacctaatacaaccattttggtggtttcaacgaaatggtcagatgcagcttgattgctggcttcgcacgcttgagtcgcgcgggccagtaccttttgaaaattgcgccagtcccgataatccagtaacggtgccaattctctcgctgaccaaaattcttgcccttcagtgccataatgccgtatttcttcaaaaggttgatgatgttcgttcattgcccactccatgtgatatcgattgcaaagaaagtaagtctataactgtatttatatacagttgtgagtatctcacgttctcactgcgctgcgcaaaaaaacatcgcaaaatctggagcaggtacgcaaaacagaattgaatgttgcggggaagaaaaatgccgctctgtttgagtgggcggcatttgtgaaggctgaaaggtaagaattagtgttacgagttactcaatattctgaatctgctcgcgcatctgctcaatcaacactttcagctcgatggcagaattcgtcacttcggcattgatagatttcgacgcaagagtgttcgactcgcggttgaactcttgcatcataaagtccagacgacgaccaacggcttcttttttcttcagaatgttgtaggtctctttgacatgcgcttccaggcggtccagttcttcggcaacatcaattcgttgtgccagcagaaccaactcctgctccaggcggttgttttccagttgcacttgagcatcttccagcttcgcgaccagacgctcacgctgccattgcaggatttccggcatatgggcgcggactttgaccacttcggcggtgacgccttccagacgctgctcgatcaacgctttcagcgcctgaccttcggtttcacgtgcgacgataaagtcgtccagggtaccatccaacgccgcgagaatttcagcggcaatcgcgtcgagatcctgctcctgggctgccattacgcccggccagcgcagaatatcaaccgggttgatttccccttcgtcactctgcatttttacccagttcgcggcagttaccagctgtttagccagtttttcgttgaggatcagctcaccttgcgcgctaacatctggctcatagcgcagggtacattccactttaccgcgcgtcaggcgagaacgaatacgctcgcgaacgacaggttcaaggctacggaactgctccggcagacgaaagtaagtttccagataacgctggtttaccgagcgcatttcccaggttgcgctcccccattcacccttgatttcacgccgggcgtaggcggtcatactgcggatcatagacgttcctgtttataaaaggagaggtggaaggattatagccatcgatgccttgtcaggataggaataacctccggaagtccgtataatgcgcagccacatttgtttcaagccggagatttcaatatgcgtccagcaggccgtagcaataatcaggtgcgtcccgttaccctgactcgtaactatacaaaacatgcagaaggctcggtgctggtcgaatttggcgataccaaagtgttgtgtaccgcctctattgaagaaggcgtgccgcgcttcctgaaaggtcagggccagggctggatcaccgcagagtacggtatgctgccgcgttctacccacacccgtaacgctcgtgaagcggcgaaaggtaagcagggtggacgcacaatggaaatccagcgtctgatcgcccgtgcgcttcgcgcggcagtagatttgaaagcgctgggtgagttcaccattacgctggactgcgacgtgcttcaggctgatggtggcactcgtaccgcttcgattacgggtgcctgcgtggcgctggcagatgcgctacagaagctggtggaaaacggtaagctgaaaaccaatccgatgaaagggatggtagccgcggtttctgtcgggattgtgaacggcgaagcggtttgcgatctggaatacgttgaagactctgccgcagagaccgacatgaacgtagtgatgaccgaagacgggcgcatcattgaagtgcaggggacggcagaaggcgaaccgttcacccacgaagaattactcaccttgttggctctggcccgagggggaatcgaatccattgtagcgacgcagaaggcggcgctggcaaactgatttttaaggcgactgatgagtcgccttttttttgtctgtagaaaagtaagatgaggagcgaaggcatgaaaccatatcagcgccagtttattgaatttgcgcttagcaagcaggtgttaaagtttggcgagtttacgctgaaatccgggcgtaaaagcccctatttcttcaacgccgggctgtttaataccgggcgcgacctggcactgttaggccgtttttacgctgaagcattggtggattccggcattgagttcgatctgctgtttggccctgcttacaaagggatcccgattgccaccacaaccgccgtggcgctggcggagcatcatgacctggacctgccgtactgctttaaccgcaaagaggcaaaaaaccacggtgaaggcggcaatctggttggtagcgcgttacaaggacgcgtaatgctggtagatgatgtgatcaccgccggaacggcgattcgtgagtcgatggaaattattcaggccaatggcgcgacgcttgctggcgtgttgatttcgctcgatcgtcaggaacgggggcgcagcgagatttcggcgattcaggaagttgagcgtgattacaactgcaaagtgatctctatcatcaccctgaaagacctgattgcttacctggaagagaagccggaaatggcggaacatctggcggcggttaaggcctatcgcgaagagtttggcgtttaaagaaactcgccggatgaaaagtcatccggcgtcatattactgcaactgcgcggcaattagcggccagcgggcgtcaaaatcatccgtcgggcggtatttaaattcgctgcggacaaaacgtgacagcataccttcacagaaggccaggatctggcttgccagcagggtttcatcggtggtgtaaccttcaccctcacgcattctcttttcacgcaatacctggcgcagctgcgcttcaatacgctcgaacagctggttgatgcgcccttgcaggcgatcctgttcaaacattagcgcatgaccagtgaggatgcgggtcaggccaggattacgctcaccaaaaccgagaagcagcaacacaatcagacgcaggcgcgctgtggtgtctttctcatctttcagaatcaggttgatgcgagtaatcaggctatcttcgataaactcaatcagactatcgaacatgcgggtcttactggggaagtggcgatacagtgccgcttcggaaacgccgacagaggcggccagttttgccgtcgtgatacgttggcttccatcgctggattccagcatcagcgccagagactgaagtatttcctcgcgacggttccttttcgcagtttgtttttctgccatgttacaaaatacccctgaaaataagcacttgccaggcggcacccacgctatgaccgcaaacgaaatgtttgcggctatgttatgacgttattcggatgcgtatgtgttactgacgaccagagtgaccaaagccgccttcaccgcggtcggtggcgtcgaaatcttccaccagattaaattcagcctgtactaccggaacaaaaatcatctgggcgatgcgttcgccaggttgaatggtgaagctgtcctgaccacggttccacacggaaatcatcaactggccctgatagtcagaatcgatcaatcctaccaggttaccaagcacgataccgtgcttatgtcccaatccggagcgcggcagcatcattgccgccagtgaaggatcggcaatatgaatcgccagcccggtcggaaccagcgtagtgtcacccggagccagttctacggcgtcgtcgagacaggcacgcaggtcaagtccggcagagccagaggtggcataagtcgggagcggaaattccttcccaacgcgcgggtccagaatcttaacgtcgatttttttcatcataacgggtcacgatctcgtcgagtaataattggccaaggagctctttgcgctcaagcggtaagactttatctccgtcctgccagaaaaggtgtaatgcgttgttgtcgctgttaaatccttgagttggctgggaaacatcgttcgcgcagatcagatcaaggtttttacggatacgtttttgccgggcgtattcttccacattatttgtttcggcggcaaatccaacgacgtagggtcgatggtcttttagtgcggcaacgcctgcgacgatatcggggtttttaaccatttttattgttaattcatcaccctgcgtggcctgctttttgattttctctggggccacggtagctgcgcgataatccgccacggcggcgcagccgataaaaatattttgctgctgtacagaagcattcacggcgacttccatttccagcgcggtcatcacatcaacacgtttaacaaacggtggcgtcggtagcgaaaccgggcctgataccagcgtgacgttcgcgccacgacgggcagcggcggcggcgatagcaaaacccatcttgccggagctgtgattagagatataacgcaccggatcgagcggttcacgcgtcgggccggcggtaatcataatgttcagatgtttcaggtcgttgacgggcgaaaaatgcgctaccgccatatccacaatggttaacggatcgagcattcgcccaggaccgatatcaccacaagcctgactgccactgtctggcccccagatgagcaaaccacgggaagcaagcacctctaaattatgctgcgtggcagcggcacggtacatctgctggttcatggcggggagcacggctacaggcgcaggtgtagccagacaaatcgtcgataccaggtcattcgccattccggcagcaacacgggcaatcaaatctgccgtggcaggggcgagaatcactaaatcagcccatttacccagctcaatatggcccatagcggcttcggctgccgggtccagcagactgtcggaaacgggataaccagaaaccgcctgcaagctaagtggggtgataaaggcttttgccgcttcggtcatggctacgcggacgtcggccccgcgatcgcgcaaacgacgcaccagttcaggggttttataggcagcaataccgccgctaacgccgagaacgatttttttaccggccaggctcatgatgatttttcctgtagggtgacaccagaagttggcgattttatcacaatacttttgttgtcgtgccttcacctgagattcactttgcgaggcgctttccaggattgaaaactggccgtcgatttaacgaaacggctatgacaggatgcgagcaccacaaaggaggtgaaggtgaaaaacaatgcacagctgttgatgccgcgcgaaaaaatgctgaagtttggtattagcgccttaacggatgtcgagctgctggcgctatttctgcgtaccggaacgcgcggtaaagatgtattaaccctggcaaaagagatgctggagaatttcggctctctttatggcttgttggtgatgctgccaacttactgatttagtgtatgatggtgtttttgaggtgctccagtggcttctgtttctatcagctgtccctcctgttcagctactgacggggtggtgcgtaacggcaaaagcactgccggacatcagcgctatctctgctctcactgccgtaaaacatggcaactgcagttcacttacaccgcttctcaacccggtacgcaccagaaaatcattgatatggccatgaatggcgttggatgccgggcaactgcacgcattatgggcgttggcctcaacacgattttacgtcacttaaaaaactcaggccgcagtcggtaacctcgcgcatacagccgggcagtgacgtcatcgtctgcgcggaaatggacgaacagtggggctatgtcggggctaaatcgcgccagcgctggctgttttacgcgtatgacagtctccggaagacggttgttgcgcacgtattcggtgaacgcactatggcgacgctggggcgtcttatgagcctgctgtcaccctttgacgtggtgatatggatgacggatggctggccgctgtatgaatcccgcctgaagggaaagctgcacgtaatcagcaagcgatatacgcagcgaattgagcggcataacctgaatctgaggcagcacctggcacggctgggacggaagtcgctgtcgttctcaaaatcggtggagctgcatgacaaagtcatcgggcattatctgaacataaaacactatcaataagttggagtcattacctggcttgttaacctctgaatatgaacaatttagtggcgttcatggaattggcgtagcgaaatttgcccagttaaaggggattgctgaactggcgcggcgttactacaacgtgcggatgcgtgaagaaagccctttactcagcccggagatgacgcgggaatttttacaaagccagctcacgggtgaggagcgggagatctttatggtgatctttctcgactcacaacaccgggttataacgcatagccgtcttttttccggcacgctaaaccatgttgaagtccatcctcgggaaattatccgggaagcgataaaaataaacgcctcggcgctgatccttgcacataatcacccttcgggttgtgctgaacccagtaaagcggataaactcattactgaacggataataaagagttgtcagttcatggatttacgcgtgctcgaccatatcgtgattgggcgtggagagtatgtttcttttgccgaacgcggctggatttaacccgctatgcgcgatccttcgggatctttgtctgttcgggacttgagcacatcgctgagtcagcgtatactacgccacctttgagaatctcgggtttggcatttgggcctggcaatcgagagttcacatagaactgcgatgaccgggctgtaaagcctgacgaggcgccaataccccatacgaagctcgagctaatttgatttttggagaatagacatgtcccgagtctgccaagttactggcaagcgtccggtgaccggtaacaaccgttcccacgcactgaacgcgactaaacgccgtttcctgccgaacctgcactctcaccgtttctgggttgagagcgaaaagcgttttgtcaccctgcgcgtatctgctaaaggtatgcgtgtaatcgataaaaaaggcatcgatacagttctggctgaactgcgtgcccgtggcgaaaagtactaagtacttagaggaaataaatcatggctaaaggtattcgtgagaaaatcaagctggtttcttctgctggtactggtcacttctataccactacgaagaacaaacgtactaagccggaaaaactggaactgaaaaaattcgatccagttgttcgccagcacgtgatctacaaagaagcgaaaatcaaataattctcgctttgatgtaacaaaaaacctcgctccggcggggttttttgttatctgcttgcccccatattgattgcatctgttcattcctggagatgctatgcctgaattacccgaagttgaaaccagccgtcgcggcatagaaccgcatctcgttggtgcaaccattcttcatgcggtggtgcgcaacggacgcttgcgctggccggtttcagaagagatctaccgtttaagcgaccaaccagtgcttagcgtgcagcggcgggctaaatatctgctgctggagctgcctgagggctggattatcattcatttggggatgtctggcagcctgcgcatccttccagaagaacttccccctgaaaagcatgaccatgtggatttggtgatgagcaacggcaaagtgctgcgctacaccgatccgcgccgctttggtgcctggctgtggaccaaagagctggaagggcacaacgtgctggctcatcttggaccggagccgcttagcgacgatttcaatggtgagtatctgcatcagaagtgcgcgaagaaaaaaacggcgattaaaccgtggctgatggataacaagctggtggtaggggtagggaatatctatgccagcgaatcactgtttgcggcggggatccatccggatcggctggcgtcatcactgtcgctggcagagtgtgaattgttagctcgggtgattaaagcggtgttgctgcgttcgattgagcagggtggtacaacgctgaaagattttctgcaaagtgatggtaaaccgggctatttcgcgcaggaattgcaggtttacgggcgaaaaggtgagccgtgtcgggtgtgcggtacgccgattgtggcgactaaacatgcgcagcgggcaacgttttattgtcggcagtgccagaagtaattcatacgcgccggatggcataccatccggcataaacgctacgctaacttcgccaccagcgcctgatggacattctccggcaggaaatgggtgacatcgccctgatggcgcgccacctctttcaccaacgatgaagagataaacgaccactctttcgacggcatcagaaacacactttccagttccggcattaagtggcgattcatatgcgccagctgcatttcatattcaaaatccgccaccgcacgcaggccacgaatcagcaccgtagcgtgttgattacgggcgaagttcgccatcaaatcactaaacccaaccacttccacgttccccagatgcgcggttgcctgctgtgtcagcgccacacgctcttccagggtaaacatcggttttttactggggctggcggcaatcgccagaataacgtgatcgaacatttgcgtggcgcgcgtcacgatatcgatatgaccattggtaatgggatcgaaagtacccggataaatcgcccgtttttgcataacaacctcaatgcgttttcggtggcaggtaaggttccagcagttgaagcagacgctgtagcgcgccctggttttgatacagtacttcaacggcatgacggccatagaaactacggtaatcggcgtcggtgagtaaagaggaaacctcttttgcaagcgtagtggcatcggtaacggtaatcagcccgcttgcctgctccagccgcgcgcaaatgtctttgaaattaaaagtatgcggccccatcaataccggaatagcgtgtgcggcagcttccagaggattatgccctccacgttcaaccagtgaaccgccaacaaaggcgagatcggcaatgccgtacagtaacatcaactcgcccatcgtatcgccaaccacaacctgcgtgctggtggaggggacttcccctgaagagcgtgtgatatagcttagtccagcctggcggacaaggttaatcgcatccgggaagcgttctggatgacggggtaccaggatgagcaataaattcgggaattgctgtaataatgcctgatgtgcggcgatcaccacactctcttcaccttcgtgagtgctggtggcaatccataccgggcggtgtggtgcccactggcggcgcagcgtcacggctttagcagccaactgcggcgttacagaaatatcgaatttcaggctaccggtaacggttacctggttattttttgcgcccagcgccacaaaacgtgcaccatcttcttcattttgcgcagcaatcagcgtaatacgacgcagtaagcggcggacgaatttacccagtttggcataacctgcggccgagcgggcagagagtcgcgcgttagcgatcaccagcggaattttacgtttatgtagcgccgcaatcaggttaggccatagttcggtttccataatcaacaccagtttggggtcgactttattcaggaaacggttgagcgcatcgggcaggtcatacggcagataaacgtgctgaacatccttcccgaaagccgattgtacgcgctccgaaccggttggcgtcatggttgtaacggtaatcggtaaatcaggataacgatggcgcagcgcgcgcaccaacgggatcgccgccagagtttcaccgacggagacggagtgcagcataatgccgcctggttttagcggatggcggtaaaaaccgtaacgttcaccccagcgttttcgataggccggagccttacgtccgcgcacccagagccgtatccagatcagcggctgaataaggtagagaagggcggtgtaaagcaattcgagcatagtaaatagctgacttatggatgtgctggggattctatgtatttagctgtggctttaccattacttttcccgtttttgacttaaatagcaatttacccgccaattcttgctgaacatctatactttttttgtatttttatgcgattcattgatttctgctgtacgtgcaggaaggaatcgcagagcaacagtgaaagaatatggttgctaatgattttatttgattgatttctttattgaaaatcaacaatgtgcttaaaaagcattcgggtcggattgccgcgaaagaagtgatacactagcgcgtcaatatcagtgcggtatcagtattcaggtagctgttgagcctggggcggtagcgtgctttttctgcttcaccttaatcggataatctcaacaaaaagagttacttgtggataagccatttcgaagaattttgctcattaagatgcgttttcatggggatatgttattaactactcccgtcattagttcgctgaaaaaaaattaccctgacgcaaaaatcgatgtgctgctttatcaggacaccaccccgatcctgtctgaaaatccagagattaacgcgctctacggcataaaaaataaaaaagcaaaagcctcagaaaaaattgccaacttttttcatctcatcaaggtattacgtgccaataagtatgaccttatcgtcaatcttaccgatcaatggatggttgctatactggttcgcttattaaatgcccgtgtgaaaatttcccaggattatcatcatcggcagtctgctttttggcgtaaaagtttcacccatttagtgccgttgcagggtggaaatgtggtggaaagtaacttatccgtgctgacaccattgggacttgattcgttggtgaagcagacaaccatgagttacccgcctgcaagctggaaacgtatgcgtcgcgaacttgatcacgctggtgttggacaaaattatgtggttatccaacctacggcgcggcaaatcttcaaatgctgggacaacgccaagttttccgctgtgattgatgccttacatgctcgtggttatgaagtcgttctgacgtccggcccagataaagacgatctggcctgcgtcaatgaaattgcgcagggatgccagacgccaccagtaacggcgctggctggaaaggtgaccttcccggaacttggtgcgttaatcgatcatgcgcagctgtttattggcgttgattccgcaccggcgcatattgccgctgcagttaatacgccgctgatatcgctgtttggtgcgacagaccatattttctggcgtccttggtcaaataacatgattcaattctgggcgggagattaccgggaaatgccaacgcgcgatcagcgtgaccgaaatgagatgtatctttcggttattccggcggcagatgtcattgctgctgtcgataaattactgccctcctccacgacaggtacgtcgttatgatcgttgctttttgtttatataaatattttccctttggcggtttgcagcgcgattttatgcgtattgctcagacagtcgccgcccgaggtcatcatgttcgggtttatacccagtcgtgggaaggcgaatgccctgatgtatttgaactgatcaaagtgccggttaaatcgcataccaatcacgggcgcaatgcggagtattttgcctgggtgcaaaaacatttacgcgaacatcccgtcgataaagtcgttggattcaacaaaatgccggggctggacgtttattatgccgctgatgtttgttatgccgagaaagtcgcgcaggaaaaaggctttttctatcacctgacgtcacgttatcgccattatgccgcctttgagcgggcaaccttcgaacagggcaagccgacacagctgctgatgctgacagataagcaaatcgccgatttccagaaacattatcagactgaagcggagcgttttcatattctgccaccggggatttatcctgatcgtaaatatagccagcagccagctaatagccgtgaaatcttccgtaagaagaatggaataaccgaacaacaatatttattgttgcaggtcggttcagacttcacgcgtaaaggtgtcgatcgttccattgaagcacttgcttcgttaccggattcgctgcgccacaacacattgctatatgttgttggacaggataagccgcgaaaatttgaggcgctggcagaaaaacgcggcgtgcgcagtaatgttcacttcttctcggggcgcaacgatgtctcggaattaatggcggcggcggatttattactgcatcctgcctaccaggaagcagcgggaattgtgctactggaagcgattactgcaggattaccggtactaacaacagccgtttgtggctatgcgcattatattgtcgacgccaattgcggcgaggctattgctgagccattccgccaggaaacattgaatgagattttacgcaaagcgttaacgcaatcttcattgcgccaggcctgggcggaaaatgcgcgacattatgctgatacacaagatttatacagtctgccagagaaagcggcggatatcataacgggtggtctggatggttgaacttaaagagccgtttgccacgttatggcgcggtaaagatccttttgaggaagttaaaaccttgcagggtgaggtttttcgtgaactggaaactcgccgcactctgcgatttgaaatggcgggcaaaagctattttctcaaatggcatcgcggcacgaccctgaaagagataatcaaaaatttactctcattgcggatgccagtattaggcgcagaccgcgaatggaatgcgattcatcgactgcgggatgtcggcgttgatactatgtatggggtggcatttggcgaaaaaggtattaatccgctgagcagaacctcgtttattattaccgaagatctgaccccaaccatcagtctggaagattactgtgctgactgggcgaccaacccaccagatgttcgcgtaaagcgtatgcttattaagcgtgtcgcgacgatggtgcgcgatatgcatgctgtgggcattaaccaccgtgactgttatatctgtcatttcctgctgcacttgcctttttccggtaaggaagaggagttaaaaatttcggtaattgacctgcaccgggcgcagcttcgcacgcgcgttccacgtcgttggcgcgataaagatcttattgggctttatttttcttcgatgaatatcggcctgactcagcgggatatctggcggtttatgaaagtgtattttgtcgccccgcttaaagacattctcaagcaggaacaaggactgctgtcgcaagcagaagcaaaagccacaaaaatcagggaaagaacgattcgaaaatcgttgtaatttccggagagaaatatgagtgcccactattttaatccacaagagatgatcaataagacaatcatcttcgatgaaaggccagcggcgtcagtggcatcatcattccatgttgcttatggcattgataaaaactttctttttggttgtggtgtttcaatcacgtcagttttgttacataacaacgacgtgagttttgttttccacgtttttattgatgatatccctgaagccgatatccagcgtttagcccaattggcgaaaagctatcgtacctgtatccagatccatctggtaaattgtgaacggcttaaggcattaccgacgaccaaaaattggtctattgccatgtatttccgttttgtaattgcagattactttattgatcaacaagataagatcctttacctggatgctgatatcgcctgtcagggaaacttaaagccgctgataacaatggatcttgccaataacgttgctgctgttgttactgaacgcgatgctaactggtggtcgttacggggtcaaagtctgcagtgtaatgaacttgaaaagggttactttaattcaggtgtcctgttaattaatacactagcgtgggcgcaggagtccgtttctgctaaagcgatgtcgatgcttgctgataaagccgtcgtttcccgtttaacctatatggatcaagatatacttaatcttatcctgtcagggaaagttaaattcattgatgctaaatacaatactcaatttagtttaaattatgaattaaaaaaatcatttgtttgtccaattaatgatgaaaccgtattaattcattatgtcggcccgacaaaaccctggcattactgggccggttatccaagtgcgcaaccttttatcaacgccaaagaagcatcgccctggaaaaatgaaccgtttatgcggccaattaattcaaactatgctcgttattgcgccaagcataattttaaacaaaatgaaccaattaacgggataatgaattatatttattatttttatttaaagataataaaatgatattgagaaaagttaaatgaatgaatttataaaagaacggttttcgtatttagcagataataaaaaagaaaacgccccagaactaaatgtttcctacggtatcgataagaattttttgtatggtgctggcgtttcaatttcttccgttttgattaataattcagatattaattttgtctttcatgttttcactgattatgtggatgatgattatttaaagtcatttaatgaaacagcaaaacaatttaatacctcaattattgtatatttaattgacccaaaatactttgctgatctgccgacgtcacagttttggtcgtacgcgacatacttcagggtattgtcctttgaatatctgagtgaaagtatttccacactgctgtatctggatgccgatgtcgtttgtaaaggaagtctgaagcctctcacagaaattatatttaaagatgagtttgctgcggtcattcctgacaatgttagtactcaggcggcatgtgcaaaacgcctcaacattcccgagatgaatggacgttatttcaatgcaggcgttatctatgtcaatcttaaaaaatggcatgaagcaaatttgacaccgtatttactcacgcttttacgaggggaaactaaatatggctctcttaaatatttagatcaggatgcgttgaatatcgcatttaatatgaataatatctacctcgcgaaggattttgatactatttataccctgaaaaacgaacttcatgatcgtagtcatcgaaagtatcagcaaaccattaccgataaaacagtattgattcactatacagggataactaaaccatggcatagctgggctggttatccgtctgcatcatactttaatatcgcgcgtgaacaatctccctggaagaaatatcctcttaaagaggcgcggactgttgcagaaatgcagaaacaatataagcatctgtttgcccatggtgagtatattaaaggcataacttcattaattaagtacaagcttaagaaataaattactcttatgattacaagtatacgctatcgcggcttctcattttattacaaagataatgataataaatataaagaaatctttgatgaaatactggcctataattttaaaacagtaaaagtattacgtaatattaatgataccaaagtatcattgattgatacgaaatatggtcgctatgtttttaaagtctttgccccgaaaacgaaaaggaatgaacgttttttaaaatcttttgtaaaaggtgactactatcagaatttgatcgttgaaaccgatcgtgtcagaagtgcaggtcttacttttcctaatgatttttattttctggctgagcgtaaaattttcaactatgccagtgtttttatcatgcttatcgagtatgtcgagggcgtagagctcaatgatatgccgatcattccagaagatgttaaagcagaaattaaggcttcaatggaaaaattgcatgccttaaatatgctatcgggcgacccacaccggggtaactttatcgttagtaaagatggtgtcaggataattgacctatccggtaaaagctgtacggcagagcgtaaagctcgtgatcgtctggccatggaacgtcacctgggtattgccaacgaaataaaagattatggctactattcagtaatctacagaaccaaactacgcaaatttattaaaaaattaaaaggcaaagcgtaaaccacacagtcaaaacggaaccaacatggatttattagctgagagtattactgaagtcgctgtctctggggaaattgctaacaccgatcgtgtgttaaatatcgcttacggtattgaccgtaactttttatttggtgcggcagtatctatgcaatcagttgttatgcataatccggaccttgcggttaagtttcatctctttaccgactacattgatgaagattatctacaacgtgttaatgcttttaccagcaaaaatgctaacgttgaagtaagaatttataaagtctccagtgcctttattgatatcttccccagcctgaaacagtggtcttatgcaacattcttccgtttagttgcgttccagtatctgagtgaaactattgaaaatctgttatatatcgatgctgatgtcatctgtaaaggctcattagctggattgcttgatattaattttgatggggataagtttgcagctgttattaaagatgtgccttttatgcaggaaaaaccagcgaagcgtctggctatagagggacttccagggaattatttcaacgccggtgtagtatatctgcagcttgaagcatgggcgaaaaatgattttatgaataaagccattgctatgctggcaagtgacccgcagcacacgaagtataaatgccttgatcaggatattttaaatattctgttctttggtcattgtatttttattagcggcgattatgattgcttttatggcatcgattatgagttaaaaaataaaagcgatgaagattataaaaagaccattaccgatgatactaagctgattcattatgttggcgtaacgaagccctggaacgactggacgaattatccctgccagaagtattttaatgaggcttatcaggcttcttgctggaatgatgtggcgtttattccagccacgaatgaaaagcagtatcaagtgaaatatcaacatgcaaagaaaaatggtgatacgtttaacgcttttatttactttattaaatttaaattaaataagtataaaagaaaactatttggataataataaagatcatggatgtctgagttacaataataattaaggatgagtactatcatattttattagttcaggcaagagaacacgatgagcaatgattaccctttagtatccataataataccgacgtataattcatctgattacattactgaaactctaacgaaattagaaaaacaaacttacccaaattttgaaattgttattgttaatgatggttctaaagataacacatcaaacgttttgagagagtatgggttaacccactctcgattaattattatcaataaagaaaatggcggtgtttcgtctgccaggaatacaggtatccgcaaggcgcaaggacagtttatatgttttatggatgatgatgatgagatagatcctaactatctgctgaagatgtataccagacaacatgagacgggaggggatgcgatttattgtgggctttatggccattatataaaagatggtgttacttactcacctataaatacagagtttaatgaaggatctttacttttcgactttttttataaaaaggttagattccatatagggtgcttgtttataagaaaacaacttctggaagagaataatcttttttttgatgaagatttacgactaggagaagatctggattttatctatcgactgctaattacatgcgatatgtatgcggttccatattatatgtataagcataactatagagaaaattccttaatgaactcatgtagaaccatcactcattatcgacatgagtcatttgcgcacgaaagaatctactcttctgtgatgcagttatacaaaggtaacaggaaagaagaaattcatacattattgagtcaaaatagagcttatcataaaactcgttatttatggaatgttctacttaatggtgattttgaactattaaatcaattagttgaaagcaatgaaaaagaattgaatgattgtaatctttctggcaagagagataaaagacgagcaaaaatattagcatcaaaaaattatattttctggaggatggtaagactggtaaataggaaaaagaataaacgttagatcttgcattaaataatccgtcctcgtagcataggttgaaactatatgtcattttgttggaatgaaattaattctggtataaagtctttaattctcatattatgtattttttctttgatgactttgtctttatgggatgatgttgcaacaaagtttcttcatgcagctggaattatatctgcattgtattttctaataacaccaaaaaaaacaataactaacaatcctactttgttaattttcatctcattatgtcttttgggaatcataaatatcatctggtattcacattataaagtttcaggctctgtttataccaatgcatatcgtggcccaatggaaactgggaaaattgccttgtgtagtgcttttattttcttggttctttttgctaaaaatgagttgagaacaaaaataaaatttgggaaactaattctgttcgcatccctggcaacgcagttacttttttttgcgcatgccatgtggcaacatttctatttaaacgttgaccgtgttgcattatcagcttcccacgctacaacagcaggctacatcatccttttcccttctttactggcatcaattctcattttaaaatccgactttagacataaaacaacattatatacaattaacttcatgcttagcttatgtgctgtcatagtaactgaaacgcgtgcagccatattagtgtttccattctttgcgttactattaatcgtaatggatagttatattaataagcgaattaattataagttatattgttttattgcgattgcattattagcaggtgtattttcttttaaagatacattgcttatgagaatgaatgacttaaataacgatttagttaattattcgcatgataacaccagaacttcagtcggtgcccgtctggcaatgtatgaagttggcttaaaaacatattctccaataggacaatcactggaaaaacgagcggaaaaaatacatgaactagaagaaaaagagcctagattgagtggcgctttaccctatatagattctcatttgcataacgatctcatagatacgttatcaacgcgtggtattcctggagttgtattaacaattttagccttttcagcaatactcatatatgccttaagaactgctaaagaaccttatattttaatcttgcttttttcactactggtagtaggcctaagtgatgtaatactcttttctaaaccggttccgactgctgtgtttgtcaccataatattgctttgtgcttattttaaagcacaatcagaccaatgtttattagataaataatgaatatgtgaaataaaatcagcaaggaggctgattttatttcaaaattatctattaaggggttgtaatttaaatcatagcagcgttttcttcaatgaatcgcttaacagcatttgctgtcaattgagacaactcattccccggagccctacaaaccatctgattcttcccatatccaccaattaatcccggatcggttggtccataaaccgtgatattgggtctatccagtgccgccgttaaatggcttaaccccgtatccaccgacactacaaatttagccccggccagcacgcgggcaacgccttccagactcatcttcggcaatacttcaacataagcaaatccttccgccagtcgtttcgcccgctcttcctcatgcggcgcgccccacggaagtttaatccgtattcctgaatcagccagtaaaccaatcaattctcgccagtgttcttccggccagtgtttatcatcacgggtcgtcgcatgaagaaatacggcatattcgccagcatctgtaggcaggttcgtcaggaaatgctgtgcaatagcataatcgccctgggtttgcggtttgctatagcccagacttttggcaaacagttcgcgggtgcgttctacggcgtgctgctgttttgcaatatgatgcttacgattgtaaaacagactggctaaaggttcgcgagcggtttgccagtccatgccatgctttacgccatgcgccagacgcgtcaccagcgccgcgctttttaccagcccctgagcgtcgataactgcgtcatagttctctgcttgtagcgcttcacgaaacgctttgcgttccgcttttatgggggccgagaaccaggctttacgccagcgacgtattgccacaggaataactcgctcaacggcggcgtgccaggaaggaatctgtgcgaacccttcttccaccacccagtcaaacttaatccctgggattgcctgctgggcatcagtgagtgcgggcaacgtatggagaacatcgcccatcgacgatgttttaacgatcaaaacccgcatccgtcaggcttcctcttgtaacaatagcgcgttgagttcttccagtacgcgctggggagtaatgtcgattaagctctggtgataaccctccgcagcgtcacctttacgcactttgtgatagccggtaatcaggcggatcacgcgcgctttatgggatagcggcggtgtgaagtccgggctactcggaccatacagggcaaccagcggacgattgagcgccgccgcaacgtgcatcaggccagaatcgttagtgacaatggctttacaggctgcaatcaggataaccgcttgatcaagctgtgtttcccccgccaggttccgacaccatgcctgctgctcggtattcaaagcggcaagaatctcattgcccgcttcatgatctttcgccgagccaaacagaaccacctgataaccttcatcaatcagctgctttgccagttccgcatagtggtagtgtggccagcgttttgccggaccaaactccgcacccgggcaaaaaccaatcatcggacgttctgatgaaagcgaaaattgattacaggtatatgatttttcaccttcgctcacctgcaattgcggccataacaacggttttggtagatcttgtgcggtacgcatcacgcctttgtcataggccagcgcgacatagcgttccaccattagcggccaggcttctttatcgagcacgcgtaaatcgttgagtaaaccgtagcgcatctcgccgcgccagccggtgcgatgaggaatacccgcgaagaaaggcactaatgcagatttgaaggagttgggtaagacgtaggcgcggtcgtagcgcttttcacgcaggctatgacccagtttgcggcgttcgccgatttccagcgctccgtgaccgagaggcataggaatagcttcgttaacttccggcatccgcgataataatggacggcaccatgccggtgccatcacatcgattatcgcctggggatagcgcgcctggagcgtgcgatagagactttgcgacatcatcatgtcgccaacccaagacgggccgatcaccagtattttcatgcagagctcttatgcgtcgcgattcagccaggccatgtattccgttacaccttcagcaacggttttgaacggtttgtcgtaacccgccgcgcgcagatttgtcagatctgcctgagtgaacgcctggtagcggcctttcagcttatccgggaacggaatgtattcgatctggcctttcttgtgataagccagcgtagcatcagctacagcctggaaggattccgcacgaccagtaccgaggttgaagatgccggaaacgccattttccaggaaccacagattcacatcagccacgtcgcccacatagacgaagtcgcgtttgaagttctcgctaccttcaaacagcttcggtgattcaccgttgttaagctgggtgttgagatggaaagcgacgctcgccatgctgcctttatggccttcacgcggtccataaacgttgaaatagcggaagccaacaatctgcgagttagcttcaggcaggatttggcgaacatattcatcaaacaggaattttgagtaaccgtagacgttcaacggtttttcgtactcgcgggattcaataaagtcggaggtgcgtccgccgtaggtggctgcggaagaggcatacaggaacgggatttcgcgctccagacagtagtgcagcagctctttggagtattgatagttgttatccatcatatacttgccatcccactcggtggtggaagagcacgcgccttcgtggaaaatcgcttcgacatcgccgaactcttcgccagccataatctggatcaggaagtcttccttatccatatagtccgcgatatccagatccaccaggttcacaaacttggtgccgtctttcaggttgtccaccaccagaatatcggtgatgcctttatcattcagggccttaacgatgttgctgccgataaagcccgcgccgccggtaacgatgatcataactgtaaccttcgaattatggagtcagagacaatctcagacacgaatacttctatcatatcactacacggcgttggcttcagccattcgccaaaagtgagattgatggacgttatttatcctgaattttgcagaagtgttaacgcgtcatctcgtcgcgacctataagtttgggtaatatgtgctggaatttgccctgtctggagaatcgcaatgcgtggagaattttatcagcagttaaccaacgatctggaaaccgcacgggcggaagggttgtttaaagaagagcgcattattacgtctgcgcagcaagcagatatcactgtggctgatggaagccacgtcattaacttttgtgccaataactatctcgggctggcgaattatccggatctgattgcggcggcaaaggcgggaatggattctcacggtttcggcatggcttcggtgcgttttatttgcggcactcaggacagccataaagagcttgaacaaaaactggcggcattcctggggatggaagatgcgattctctactcttcctgctttgatgctaacggtggcctgtttgaaacgctgctgggcgcggaagacgccattatctccgacgcactgaaccacgcgtctattattgatggtgtgcgtctgtgtaaagctaaacgctatcgctatgccaacaacgatatgcaggagctggaagcacgtctgaaagaagcgcgtgaagccggtgcgcgtcatgtgctgattgccaccgatggtgtgttctcgatggacggcgtgattgccaacctgaagggcgtttgcgatctcgcagataaatatgatgccctggtgatggtagacgactcccacgcggtcggttttgtcggtgaaaatggtcgtggttcccatgaatactgcgatgtgatgggccgggtcgatattatcaccggcacgctcggtaaagcgctgggcggggcttctggtggttataccgcggcgcgcaaagaagtggttgagtggctgcgccagcgttctcgtccgtacctgttttccaactcgctggcaccggccattgttgccgcatccatcaaagtactggagatggtcgaagcgggtagcgagctgcgtgaccgtctgtgggcgaacgcgcgtcagttccgtgagcaaatgtcggcggcgggctttaccctggcgggagccgatcacgccattattccggtcatgcttggtgatgcggtagtggcgcagaaatttgcccgtgagctgcaaaaagagggcatttacgtcaccggtttcttctatccggtcgttccgaaaggtcaggcgcgtattcgtacccagatgtctgcggcgcatacccctgagcaaattacgcgtgcagtagaagcattcacgcgtattggtaaacaactgggcgttattgcctgaggatgtgagatgaaagcgttatccaaactgaaagcggaagagggcatctggatgaccgacgttcctgtaccggaactcgggcataacgatctgctgattaaaatccgtaaaacagccatctgcgggactgacgttcacatctataactgggatgagtggtcgcaaaaaaccatcccggtgccgatggtcgtgggccatgaatatgtcggtgaagtggtaggtattggtcaggaagtgaagggcttcaagattggcgatcgcgtttctggcgaaggccatatcacctgcggtcactgtcgcaactgtcgtggcggtcgtacccatctgtgccgcaacacgatcggcgtcggcgttaaccgcccgggctgcttcgccgaatatctggtgattccggcgttcaacgccttcaaaattcccgacaatatctccgacgacctggcttccatttttgatcccttcggtaacgccgtgcataccgcgctgtcgttcgatctggttggcgaggatgtgctggtctctggtgcaggcccgattggtattatggcagcggcggtggcgaaacacgttggtgcacgcaatgtggtgatcactgatgttaacgaatatcgtctcgaactggcgcgcaaaatgggtatcacccgtgcggtcaacgtcgctaaagaaaaccttaatgatgtgatggcagaactgggcatgaccgaaggctttgatgtcggtctggaaatgtccggtgcgccgccagcgtttcgtaccatgctcgacaccatgaaccacggcggtcgcattgcgatgctgggtattccaccgtccgatatgtctatcgactggaccaaagtaatctttaaaggcttgttcattaaaggtatttacggtcgtgagatgtttgaaacctggtacaagatggcggcgctgattcagtcaggtctggatctctcgccgatcattacccatcgtttctctatcgatgatttccagaagggctttgacgctatgcgttcgggccagtccgggaaagtaattctgagctgggattaacacgaacaagggctggtattccagcccttttgcctgaggataatccgttaaatatgtaaaatcctgtcagtgtaataaagatatcgtaattgcgctgatctcttatatagctgctctcattatctctctaccctgaagtgactctctcacctgtaaaaataatatctcacaggcttaatagtttcttaatacaaagcctgtaaaacgtcaggataacttcagaggtcgtcggtaatttatgatgaacagcaccaataaacttagtgttattattccgttatataatgcgggcgatgatttccgcacttgtatggaatctttaattacgcaaacctggactgctctggaaatcattattattaacgatggttcaacggataattctgttgaaatagcaaagcattacgcagaaaactatccgcacgttcgtttgttgcatcaggcgaatgctggcgcatcggtggcgcgtaatcgtgggattgaagtggcaacgggcaaatatgtcgcttttgtcgatgctgacgatgaagtctatcccaccatgtacgaaacgctgatgaccatggcgttagaggacgacctcgacgtggcgcagtgcaacgctgactggtgttttcgtgaaacgggagaaacctggaaatccatccccagcgatcgccttcgctcaaccggcgtattaaccggcccggactggctgcggatggggctttcttcgcgccgttggactcacgttgtctggatgggggtttatcgccgcgatgttattgttaaaaataacattaaatttattgccggattacatcatcaggatattgtctggacaacagaatttatgtttaatgcgctgcgtgcgcgatataccgagcaatcgttatataaatattatctgcataatacgtcagtgagtcggttgcatagacaagggaacaaaaaccttaattatcaacgtcactatattaagattactcgtctgctagagaaattaaatcgaaattatgccgacaaaattacgatttatccggaatttcatcagcaaataacttacgaagcattgcgtgtttgccatgcggtgcgcaaagagccggatattattacccgccaacggatgattgccgagatatttacttccggtatgtggtaatgactccaacttattgatagtgttttatgttcagataatgcccgatgactttgtcggtaatgactccaacttattgatagtgttttatgttcagataatgcccgatgactttgtcatgcagctccaccgattttgagaacgacagcgacttccgtcccagccgtgccaggtgctgcctcagattcaggttatgccgctcaattcgctgcgtatatcgcttgctgattacgtgcagctttcccttcaggcgggattcatacagcggccagccatccgtcatccatatcaccacgtcaaagggtgacagcaggctcataagacgccccagcgtcgccatagtgcgttcaccgaatacgtgcgcaacaaccgtcttccggagactgtcatacgcgtaaaacagccagcgctggcgcgatttagccccgacatagccccactgttcgtccatttccgcgcagacgatgacgtcactgcccggctgtatgcgcgaggttaccgactgcggcctgagttttttaagtgacgtaaaatcgtgttgaggccaacgcccataatgcgtgcagttgcccggcatccaacgccattcatggccatatcaatgattttctggtgcgtaccgggttgagaagcggtgtaagtgaactgcagttgccatgttttacggcagtgagagcagagatagcgctgatgtccggcagtgcttttgccgttacgcaccaccccgtcagtagctgaacaggagggacagctgatagaaacagaagccactggagcacctcaaaaacaccatcatacactaaatcagtaagttggcagcatcaccccggtatgtataagcgcctgattaccaatgtgcgcagcgtaaaggtgggttatcaggcgttactgtggtctttccgcttatggcaatggcgcgacaaaacgcggtcgcaccatcgcattacgcgtagcgcctttaatttacgctagcgttaagcttcgccgcttcaggctgtttgccccagccttgccactgatgctggaagtaaacgatcagcgtgctctggctgatgctttcgcttaatacttcaaagaagcgattagcataaacaggttctatcggtttcttcggtttgcacagcttcacgccacggaacggattacgcggtgtgtcgggcacagtgtttttcggcggtgtagacgtatcaacctgcggttcattcagcaagctgctggctttcaccagcgtaatgtctggcggcaggttataaaccatctgttgcaacacgcgtaccgttgaagggtgaggatgcccaatggcaatggttgatccgttgcgacgcgctaggtcaattgcgcgattgaattgcacacggatgtccgcttcgttctgtgaatcgtcgaggaacaccttccgtttgatcaccttcacgccagtgccttgcgcggcgcgcatcgcctgggtattaccaatggttacgctgtcgaggaagtaaagattataacgctccagcgcctgcatcactttctgcataccaaacaggttagaggtcatcttgctgcccatgtggttattgatccccacggcatagggcacgttattgaccgcactacgaataatgcgctcaatttcgtcgctgctcatctccgggcgcagcgtatttttctccagcggctgtttactcaacggtgccatcgggagatgaatcaacacttcgtgaccgctgttatgcgctttggtcgccatctctctggcgtgcggtgaatcgggtaatacagcgacggagatagcggaaggcatcgccagcacctggttttcgttgttcgggcgatacccaaaatcatcaatgacgatggcaagtttgccagcaattacaggggaggagagcgccaacagagcggcaaatgcaagaacgttacgacgaaatggaaacaaaacttatcttcccaaccacggctgtggattgacggcctgaccctggcggcgaatttcgaaatagagtgaaggtctgccctgaccgccactgctgcccaccagtgcaattggctggcccgcacgaacctgcgaaccaacgctcaccagcgcgctttgattatagccgtaaagactcatatcgcctttaccgtgctcaaccaccaccaccagaccgtagccttgcagccagtcagccagaatcacccgaccgtcggcaattgctttaacttcagtaccttcagaggcaccgataaccattcctttccagcgtaattcaccctgtagctgctcgccatagcgatgcagcgtagggccacgaactggccagaatgcctgaccacgcggcgcacccaggccaccagttcgggacatcagcgatttttcgctttcggtcggtttgtaggtggtgcctttgcgcgtcgcttctttctgcctgtcgcgaactgcctgagcctcacgcgcttctcgttcagcacgcgctttcgccgcggcttccgcacgggcaatactgttacgcagacgggattcgttggcacgcagttcacttagctgctgctgaccttgctggatggaagattccagccccgccagcgtctttttacgctcgttcagagcctgagtcagtttcgcctgttgggcgcgctgttcatataacagcgtttgttgctcgctttgtttctcttccagttcagcacgctgcatggcgacttcttcacgcgtttgcttcaactgggcaatggtttcttgtcgcgcctggttgagatagccgaaataagcctgtaaacgctgtccacgctggctttcttcaccgctgagaattagctgaataccggtatgctcgccctgacggaatgcggcatccagttgtgcggcgaggctgcgctcctgggcggctttttgctgctccagtttggcaatcgacgcgttcatctcatcaatctgtttattgagttgattgagcgtgttttgcgtttcgcgcagcttacgggtggcttcagagatcgcttcttcctgctttttcaattgtgcgagcaggcttgcgcgttgttgttgcttttggcgtaccgcgcgctcttttgtggcgatatcggcctgaatagatttgagttggtcacgctcatccgcgtgggcggaaaaggcgcacaacaatacgccagcgctaagaacgctggcgtagatgatgggcctgattgcaaacctgcgcggtttcacggcccgtgtcatggtattaatcgcctttcccctcatggggagggattattccacgatgaacagcggcttaccagtcatctcttgcgggatttccatacccatcagcgacaacatggtcggcgcgatgtcagaaagtttgccgcctgcaaccgctttcacgttcttatcaccaacgtaaatcagcggaactggcaggttggtgtgtgccgtgtgtgcctgacccgttgccggatcgcgcatctgttcagcgttaccgtggtcagcggtgatcagcagttgtccacccacggactcaaccgctttcgcgacttcttccacgcagtgatccagtgcttcaaccgctttaaccgccgcttccatcaccccggtgtgacctaccatgtcgccgttcggatagttacagataatggtgtcgtatttgccgctcttgatggccgcaaccagtttttcggtcagctctgcggagctcatttccggttgcagatcgtaggtagccactttcggtgagttgatcagaatgcgatcttcgcctttgaacgactcttctacgccaccgttgaagaagaaagtaacgtgggcatatttttcggtttcggaaatacgcaactgagttttgtcgtttttcgccatccactcgccgaaggtgttaaccagggaagcgggtgggtaagcaaccgcagttttgatgtcagcggcgtattcggtcagcatcacgaaatcgacgttaaccactttcttacgcgcgaagccatcgaaatcagcgttcacgaatgcacgagtgatttcacgcgcgcggtcagcacggaagttcatgaaaatcagcgcatcgccgtcttccattgccgcatctggctgaccttctgcacgaataacggtcgctttcacgaactcgtcgttttcgtcgcgagcataagctgcctgcaaaccagcaacggcagtatcggcctgaaactcaccctgcgccagagtcagcaggtcataggctttttcaacgcgatcccaacggttatcgcggtccatcgcgtagtaacgaccaatgatggacgctacgcggcctttacccagcgcagcaaatttctcttcaaattttttcagcgaggattcagcactgcgcggcggggtgtcgcgaccgtcaaggaatgcgtgcaggtagattttttctgcgccgcgttcagctgccagttctaccatcgccatgatgtgatcttcgtggctgtgtacgccgcctgcggagagcagacccataatgtgtactgctttacctgcgtttttcgctttatctaccgcgccagtcagcactggattagcaaagaaagcgcgatctttgatttcaacgtccagacgagtcaggtcctgatacacgatgcggccggcacccaggttaacgtggcctacttcggagttacccatctgacggtcaggcagaccgacttccagaccggaagcgtcgatcagggtatgcggacgattggcccacagtgcatccattaccggggttttagcactaaaaatggcgttatcctgctgttcttcacgatagccatagccatccagaatcaccagtaccataggttttttagaaaccgacattgcgacaacctcatactcaagagtcaaaatttgcgtaattttactacagctgaatcgataaaatagcctctgaagatcaaaatatacgaccgctcgcggcaagccgatgccagatttgcgcttttttttcgtcgtgccccgcaaaattgcattccagttaacgcgctggctgtatttgccgcaccgcgcaggtatactcctttcctggtttttttaatcactacgtcgggagttgttaccccccatgcaagaaattatgcaatttgttggccgtcatcccatactgagtatcgcctggatcgcgttactggtggcggttcttgtgactacgtttaagagcctgacctcgaaagtgaaggtgattactcgtggtgaagctacgcgtctgatcaacaaagaagacgctgtggttgtggatttacgtcagcgtgatgacttccgtaaaggccatatcgcaggttctatcaatctgttgccgagcgaaatcaaagccaacaatgttggtgagcttgagaagcacaaagacaaaccggttatcgtggtagacggttctggcatgcagtgccaggagcctgcaaacgcgctgacgaaagctggttttgcgcaagtattcgtgctgaaagagggcgttgctggctgggctggcgaaaacttgcctctggtgcgcggcaaataatttacctgtcgtctttcatgatgcaggccgttagctgcaattaggcccccagcgacttattgttataagcttctggggacactccattttgcagccgccctgcaacatgaaatttcagggtaaaaaaacaggagctaaattatggccaatgttgaaatctataccaaagaaacctgcccgtattgccatcgtgcaaaagcactgctgagcagcaagggcgtgagttttcaggagttgccgatcgatggcaatgccgccaagcgtgaagagatgatcaaacgcagcggtcgcaccacggttccccagatttttattgacgcacagcacattggcggctgtgatgacttgtatgcattggatgcacgtggtggactggatcccctgctgaaataacgtgtgaacgttggcattacattgcgcagtatttaaggacaacacttaagggttttctacacatgtcagaacaaaacaacactgaaatgactttccagatccaacgtatttataccaaggatatctctttcgaagcgccgaacgcgccgcacgttttccagaaagattggcaaccagaagttaaacttgatctggatacggcatcttcccaactggcagatgacgtatacgaagtggtactgcgtgttaccgtaacggcctccctgggcgaagaaaccgcgttcctgtgtgaagttcagcagggcggtattttctccatcgcgggtatcgaaggcacccagatggcacattgcctgggcgcatactgcccgaacattctgttcccgtatgctcgtgagtgcatcaccagcgtggtatcccgcggtacattcccgcaactgaaccttgcgccgattaacttcgatgcgctgttcatgaactatttgcagcagcaggctggcgaaggtactgaagaacatcaggatgcctgatgaaccaacgtaatgcttcaatgactgtgatcggtgccggctcgtacggcaccgctcttgccattaccctggcaagaaatggccacgaggttgtcctctggggccatgaccctgaacatatcgcaacgcttgaacgcgaccgctgtaacgccgcgtttctccccgatgtgccttttcccgatacgctccatcttgaaagcgatctcgccactgcgctggcagccagccgtaatattctcgtcgtcgtacccagccatgtctttggtgaagtgctgcgccagattaaaccgctgatgcgtcctgatgcgcgtctggtgtgggcgaccaaagggctggaagcggaaaccggacgtctgttacaggacgtggcgcgtgaggccttaggcgatcaaattccgctggcggttatctctggcccaacgtttgcgaaagaactggcggcaggtttaccgacggctatttcgttggcctctaccgaccagacctttgccgatgatctccaacaattgctgcactgtggcaaaagtttccgcgtttacagcaacccggatttcatcggtgtgcagcttggcggtgcggtgaaaaacgtcattgccattggcgcggggatgtccgacggtatcggttttggtgcgaatgcgcgtacggcactgatcacccgtgggctggctgaaatgtcgcgtcttggcgcggcgctgggtgccgatcctgccacctttatgggcatggcggggctgggcgatctggtgcttacctgtaccgacaaccagtcgcgtaaccgccgttttggcatgatgctcggtcagggcatggatgtacaaagcgcgcaggagaagattggtcaggtggtggaaggctaccgcaatacgaaagaagtccgcgaactggcgcatcgcttcggcgtagaaatgccaataaccgaggaaatttatcaagtattatattgcggaaaaaacgcgcgcgaggcagcattgacgttattaggtcgtgcacgcaaggacgagcgcagcagccactaaccccagggaacctttgttaccgctatgacccggcccgcgcagaacgggccggtcattatctcatcgtgtggagtaagcaatgtcgtgtgaagaactggaaattgtctggaacaatattaaagccgaagccagaacgctggcggactgtgagccaatgctggccagtttttaccacgcgacgctactcaagcacgaaaaccttggtagtgcactgagctacatgctggcgaacaagctgtcatcgccaattatgcctgctattgctatccgtgaagtggtggaagaagcctacgccgctgacccggaaatgatcgcctctgcggcctgtgatattcaggcggtgcgtacccgcgacccggcagtcgataaatactcaaccccgttgttatacctgaagggttttcatgccttgcaggcctatcgcatcggtcactggttgtggaatcaggggcgtcgcgcattggcaatctttctgcaaaaccaggtttctgtgacgttccaggtcgatattcacccggcagcaaaaattggccgtggcattatgctcgaccacgccacgggcatcgttgtgggtgaaacggcggtaattgaaaacgacgtatcgattctgcaatctgtgacgcttggcggtacgggtaaatctggtggtgaccgtcacccgaaaattcgtgaaggtgtgatgattggcgcgggcgcgaaaatcctcggcaatattgaagttggtcgcggcgcgaagattggcgcaggttccgtggtgctgcaaccggtgccgccgcatacaaccgccgctggcgttccggctcgtattgtcggtaaaccagacagcgataagccatcaatggatatggaccagcatttcaacggtattaaccatacatttgagtatggggatgggatctaatgtcctgtgatcgtgccggatgcgatgtaatcatctatccggcatacagtaactaatctctcaacaacgctcccggatatcccagctgccgccaggcttcatacaccactaccgacaccgcattggacagattcatgctgcggctgtccggcaccatcggaatgcgaattttttgttcagcgggcagggcatcaagaatgctcgctggcaggccgcgtgtttccgggccgaacatcagataatcgccatcctgatagcttacggcgctgtgagcaggcgtacctttcgtggtgagggcaaacaggcgctggggattttctgcttcgaggaacgcgcgatagtcatgatgacgcgtaacggcggtaaactcgtgatagtccagccccgcgcggcgcaggcgcttatcgtcccaggcaaatcccatcggttcgatgatatgcagacgaaagccggtattagcgcaaagacggatgatgttgccagtatttggcggaatttctggttcgtaaagtacgatgtttagcatactgcccccttagtgcgggggcaggatagcagaaaattggtgaaccgtgcggccttttcccctcaccccggccctccccggaggggcgagggagaaaaaaagagtgcggtgtcgtttcagagtgagggagtacatacagcgccgaacggtcccctctccctgagggagagggttagggtgagggggcgcaaacgactatgccgcattccctttcgccatcggagccagtgccgtaggcaactctttacccagcccctgcaccagcgaatcttgcgtaatttcactgatcgatttcgcgccagtcagcgtcatcgccactttcatctctttttcgatcagatttagcaggttagctacacccgcctggcccgctgttgccagcgcatacaggaaagcacgacccagcagtacggtgtcggcaccgagcgcaatcatacgcacgacatcaagcccgttacgaattccgctatccgccagaatggcgatatcacctttcaccgcatctgcaatagcgggcaacgcacgagcggaagagagtacaccgtccagctggcggccaccgtggttagaaaccacaattccatcagcaccaaaacgtactgcatcgcgcgcatcttccggatcgaggatccctttgatcaccatcgggccatcccagaaatcgcggatccactcaaggtctttccatgagatggacggatcgaagttattccccagccagccgatgtaatcttccagtccggtcggtttgccgagataagctgagatattacctaaatcatgtggacgaccgttcaggcccacatcccacgcccattgcggatgcgtcaccgcctgcaagtagcggcgcattgccgcatttgggccgctcatacctgaatgcgcatcacggtagcgtgcgcccggtgtcggcatatccacggtgaaaaccagcgtcgaacaacccgctgcttttgctcgctccagcgcgttacgcataaagccgcgatcgcgcagtacataaagctggaaccacattgggcgcttgatggctggcgcgacttcttcaatcgggcaaacggaaaccgtcgagagagtaaacggaatgccatgcgcgtccgccgctttggctgcctgaacttcgccacgacgcgcatacatgccacacaaacccaccggtgccagtgctaccggcatcgacaatttctcattaaacagcgtcgtttccaggcttaagtcggacatgtttttcagaatacgctggcgcagtgccacttctgacaaatcttccacgttgcggcgcagcgtgtattcagaatatgcaccaccatccatatagtggaacaggaacggcggcagaatgcgttgcgctgcggcgcgataatcgctggctgcggaaataatcatgcgtttttctccctcgaatgctcattatgctcaccgggcaggcgggtaatccgtgcgtggcgagcctgatcttcatcgaatcgtttcatggtggtgtgaacaaaactaaggtgcgccatcattgctttacgcgccccgtcggcatcaccagcaaaaatggcgtcaatgacagcctgatgttgttcggtcagttgtgaaaaaaccggtggcaccagatacatccgctgacggctatgcttcactgaggattgcaggacatcgaagaaaccgcgcatggtttgcagcagcacgatgttatgtgaggcttcggcaatcgccagatgaaaacgaacgtccgcttgtgaggcgatatccgggtcttcacttagcgttgcttcaaagcaaagctgaatcttttctttgtcgccaggtgtggcgcgcattgccgcatgccatgcggtgctggcttcaatggcgtagcgggcttccagaatatcgaaactgtaatccggatcatcggccatcagcgtttttagcggctggacgatgttttgctccgaccatgtgtcatgacgccagcgaataaacgtcccgccgccgcgtcgactgagcagcacgccttcgctcaccagttttgccagcgcctcgcgcagtgaattacgtgatacgccgagttgcatcgccagttggcgctcagcgggcaacttcatgcccgcttccaggtttttttcatcaatcagcgcccgcacacgatcggcaacctcgtctgacaggcgtctgggtaaaacaatcattaaggaatcatccacgttaagacataagcctgaagcgtggtgatcacgcccaccatacaggtgaagatcaggctgtgtttgacagtaaagcggaacaaatcagactctttgcccaccaggcctaccgccgcacaggcgatagcgatagattgcggggagatcatcttaccggtgacgccaccggtggtattggcggcaaccagcaacagatcagagacgccaatttgttgtgctgcggtggcttgcagcgcggcgaacagggcgttagatgaggtatccgacccggtcaggaatacccccagccagccgaggaacggcgagaagaaggtgaatgcatgaccggtgtgcgccagtgccagtgccagtgttgatgacagtccggaatagttcgagataaaggcgaacgccagcaccatgccgatggagtagatgggtagagccagttctttcagcgtgctgccgaaggtgctgatagcgtcagacggtttcatcttcagccagacaatcgagagcagtgcagcaaacagaatggcggtgccggtggcagagaaccagtcaaacttaaacacggcggcataggctgtagcctcgctgaccactggtggcatacgggcaaccagtttatcgaggtacggcaccggaatgttgatcacccactcatacagcgcaccacccgatgcgaacagggctttaaacggcgggatgctccacagtgttacggtagctgtcaggaacaggaacggtgtccaggcacgtaacacctgacccgcagtgtaaccggtgtgggccagcgtcatatcaatctttgacgcccccaaatcaccaaaacggaatacgcgcactggctgccagcgtttgaggaacagcgtcaggcagagcagtgataccagcgaagagataatgtccggcagctccggcccaatgaagttagagctaaggtactgagcgatggcaaacgagccgcccgcaaccacgaccgcaggccacgtctccttgataccgcgccagccgtccataatcgccatgatccagaacagcacgataatggtcataaacggtagctgccgccccaccatctggccaatctcaaagctgtcgatgcctgttacttgtccggcaaccaggattggaatgcccatcgcgccaaatgccactggcgcggtgttaacaatcaggcacagtccggcggcgtacagcggtttaaaacccaggccgaccagcaatgcggcggtaattgctaccggtgcgccaaagcctgcggctccttcaaggaaagcgccgaaacagaaaccgacgatcagcatttgcagacgctggtcaggggttatcgaaagaatagacgagcgaatgatgtcaaactgcccggttttcaccgagatcttatagacgaacactgctgcaataatgatccacgcgatgggccacaaaccatagaagaagccataaaccaccgaggccagcgcgttagcgaccggcattttatagaacagcaaagccacggcaagggcgattgctaccgtccatgaggcggcgacgtatcctttcagtttgagcttaatcagcgcaaagaagaaaaacaggatgggaagcgatgctatcagactggaaagccagatattcccggcgggatcgtagttttgttgccagagattcattgcaggtctcctggagtccacgcacatcgtgtaatgagtctgttgctcatctccttgtcacacgttgtgtaaaagtggcactgccaattgtgttgtgtagggataatgacaatgaatggttaactaaatgttatgtattggcaatattgatgtgagttttaattggggaattgtgaaccagaggtcagataagcgaagaattggtagggccaattcttgtggggggagatgtctggtaaagaaaagggcaatcctcatcagagaattgcccttagattgttgacccggggcgccttatcttgcctgatgcgcgtaacgcatcaggcaatttggcgtttgcccttagtcacactaacttaatggatcattaccactgaataccggcaccgagtgcggcggagtattcaccctggctattggtactaccttgtaatttgtagacccaacgaccattggcgctcaccatcgatacacctaaagcaactgccgattcaccgttgtaagtaccgccaccaatagaagccatgctggcacccggtgtataagcctgcggcagaccggtcattgccattgcagaagcgataccaccgctcaacttgctttcagttttagacagtttgttatccatctcaaccatccgctgatcggtgtattgcttcgtttcctgcacgctttgcttcaactgcgcgtagttcaccgcgtcgttgttgttgacgccagcggagacgttgctgatacgagtcgtactgccgttgccaccaccgagggtgatattgctatagtcgatagaaccatcagctttggtgtcgtagcgcacgccgcctgcttcagaagatttcagctgcgacacgttaaccgcatcggtggcattaacaccggcagctacgttggtgatacggcgttggttagtagaagaacctacagagattgtattttcttcctctgcaacggaaccggtacccagtgcgacgctgttgtcagcggcagcaatggaaccagaaccaatagcaacgctatctttaccctgggcgttggcatctacgccatcggtgttggtcttgaagtacttggtgctaccggtggtgacaatgtcgccaataccgttttcgatattagtaacgcgagtatccagattagtgacctgattgttcaggttagtaatgctctgggtattttgcgctacgcgctcatcagtgactttcaactgacccacgttaaccgcatcggtatccgctgaaccagctgcgacgtttgtgatctgacgttgaccgtcttcactaccgacagaaaactcacctacagagttctgcggtgcgtccatgttgtaggcggtgtagccagtctgtgcaccacgggtggtctgagaaccgttacccattgcgatactgtttgcatggtttgcgcgtgcgttactgccgatagcaatgccgttgatcgcatcagctagaaccagagtgttcaaaccgataccaatacctgcattaccattaacgacagttttcgcacccattgccagcgagtcttcaccaacggccagtgagtcttctgccgttgagttggcgtgaaagtacttggttggcgtagtggcgaccgctccaatagcgttctgcaactggcgaaccgtaacggcgtcatgggcttctgaaccatcagctacgttgatgatttggcggtatttaccgtcatcaccaattgacaatgcacctagcagttcgccgtcagtggtgtcataaccaatcaccacgccattttccgttacgctagtgtcacgagaacctttggcaatcacacggctggaaacggagctgctacccagcgcaataccggtatcaacggtgctgctgctgttctgaccaatggctacgctgctggcaccagacgcgacagcgttataacctacagctgtagcgccgacaccagaggcgcttgcatcgttaaaggctaaatcgttgtcgttagtacgaacgtagttgataccagcgccattttcttcgatataggttgcgtcggtgttaccagcgagctgattgataatttgggtgttctgctcaatcatcatattcgtcgcattcaactgagaaccgttcactgcatcggtactgtcctcactaatactgccattagcgacattagtgatgatgctggctttaccgtcatggctggcattgtaggctccagcaccgccattggcagtctcatcccacagcagggcgttatcatcaagcgcatccagggcgtcaccgacgttgttgtactcggcgttcgcaatggtgtaagtcggtgcggtgatggtgccgtcagcgttgacttctgcgtcaccacccagcgcatcagcgatgtacttattggtggtatagagttgtgagccgttaatcgcgtcgctgctggcagcagagattgcaccgttagcgacgttagtgattacactggcagttttatcttttccgtgagcggcgctaaatgcaccattttcaccggcgtccgcatcccagagcagagcgtcgtcaagagtggtatcgatagcattcagggcatcaccgacattatcgtaatcagcattagcaatggtgtacgtcggcgcagtgatggtgccgtctgcattgacttcggcaccaccccccagcgcatcaacaacataactgctcacgccgtggagttgtgagccgtttactgcgtcagaactggagtctgaaatttcaccatctgcgacatcagtgatcacgcttgcgtcaccattagtaccgtgtttggcactgaatttacctgcggtggcatcccaaagcagagcatcgccgagagacgtgctaaatgaggagttaatcgcagccagtgcatcgccgacgttataataatttgtttcaccgattttgtaggttggaccggtaaacacaccgtcagtattcacagaagcattgccgccgaagtaggtggcgatattgctgcttaagtcataaagctggctaccgttaatggcatcggaactggttgcagtgactgtgccgtccaggatattggtgattttgctggcggtattgttgccatgagctgcagtgaagacaccattgtccttatcccatttcagcgcatcctcaccaagattagtcaccgtctcagtcagattagagatgttggtggtgttagtggcgatattggtggtattcgtcgccacggcatcgttggtggttttcagctgagagccgttaacggcatcggtgctgccagtcgtcaggtcgccatctttaacgttggtgattttgctggtggtctcggtgccatgagctgccgtgaatacaccattgtccttatcccatttcagcgcatcctcaccaagattagtcaccgtctcagtcagattagagatgttggtggtgttagtggcaatattggaagtgttattggcgatattggtggtattcgtcgccacagcatcgttggtggttttcagctgagagccgttaacagcatcagtgctgtcagccgtcaggtcggcatctttaacgttggtgattttgctggtggtatcctggccgtgagctgcactgaatgcctttttagtttcgttccagagcagggcatcagcctgaaggtcaccaacggaatccgtcaggttggtgatattggtggtattggtggcaatacttgctgtattcgtggcaatgttgctggtattagtagcgatattggcggtgttggcttcgacatcgtcattggtagctttcagttgggaaccgttaaccgcatccttactggaggctgaaatcgtgccatccgcaacatcggtgattacgctggcagttgggctactagtaccatgagcagcgctgtatttgcctttggtttggtcccattgcagggtgttttcatcaagtacagcgagcgcagcccctacgttatttttgctaccattttttaaattgtaggttggtgctgtaacagtaccgtcatcaacatctactgcagcccctcctccaagcgtttttgctaccgagtcgctaatggcataaagctgtgaaccattaatggcatcgtaactgtcagacttgatcgcgccatttttcacattaacgatcttgcgttttaatgaactattgccgacagagacggtattgtctaaatccgcaatggaatctgcgcccagcgcgacagagttaataccgttggcactgctattactaccaagcgcaagactcttatcaccagttgcattactggctgtgcctaaggcaatggtgtttaagcctctcgactggctaccattacccagagcgatggcatccacgccatcagctttgttgccctggcctatggcgattgcattatctgccagagcctggctgccatttcctaatgcgatagtattgactttatcggcaaggcttccgaaccccattgccatgctattagtcccttttgccttcgcattattgccaatagcagttgcattttcagcggcttcggtctcagcacctatcgcaatagcgttcgctgcgctggcaagtgattgtctgccaaatgcgaggctgtcagtaccgctagctacactgctacgccccagggcaattgcgttttcttcagatgcgacgctacttgctcccagcgccattgaatacgcttttgacgcattggcggtgtcgccaagagcaatactcataatctcagtagctttagtggcatttcccagggcaatggcgtttgctccttccgctttggaagagtcccccatagcaatagacaatttacccaatgcttttgaataacggccgagggccattgagtattggcccaatgaatacgaagaggcacccagtgctatacttctatcgccttctgatattgcactaaccccaaaggccattgatgcaccaccaatcgcatgggtttttgacccgatggcagagctatattggccttcagctatagcgtcataacccacagcagtactggaaccactggtgttcataaaagtatttgctttcgcccctttgcctatagcaacccagctgtcgccagctgatccactaccgtaatcaacaccctggccgttgtcattcccggcattcgccaatgccccaaacgacgacaacattccacccgcaaccagcgcagaaattaacagcttactgcgcccagatttcttgccacggctttttgccgtttcgctggtaacagtataattccctgtcgcagggttccagataactttaaatattttgttcattaatgatgctcgctattccttgttataagcgtactaactgcatttattttttgcttcttttctgccgattttcagcagagggaagattgtcgaactgaatattttccatgttgatggctaacttcagatatcccaggttattgggcgatacacccttcagagtcaaattaatgtcttgccattgacctggtaataatttcaatgtggatttcattgatgtgttgaaaagtaattgttgccaccgggcaaactctttggcatcgacaggtttttcaccaccccatgtcgcattaaaaccaatatttgagataggtgtacttaataagttgaccagtgaaatatgaataacactgccattctctgtggcgtcaatggataacactcgacccgctaaagccaccgaaccattgttcaggatgaaatacttcgtttttgctgggttaaactcggtaaaaataaaagtgttttgttgatctttaacggatttaattacgtgagttaaagtctttgtactgcttattatgccagtttgttgtttttgaatagtttccagttgactctttagctgtgcttgttgtttttcaagtagatcaattttaatgttcttcttgttgtttcaataaactactttctggcttgccttcttcaatgtagtcacatcccgttaatgcgcagagaactgaaacagtgacagcactgaaaaaaatcttcttcaagttcatgtaaaaatccttatttcctccgaccagcgatcaatgccggtagagttgtccattgtattattggtgatctatgttgctttacattaatgacagtgatgtgtgtcgattaaatattgttttaagcattcatcataaaaatgtatcattcgtttcaaaagatgtctgtgtttgtatgaatatattattttcgtggattctaatgatgattattaataaatgtcaaatatgaaagaaaccatgtctgggaaaaaatttacagataatttattgtatgaatatgatgattaaaatttcacaattaaatccgaaaaaaagagacgtaactgcttgttaattaataaatgatatcttctatatatttttattgtttataggtggctatttcggtaaaaatgcattttcagaatatcaaccagcggtaaatcgacgtaaagggagtgaattgtttggtaattaggcgagtagacaggagagtccccgcattgaccagctaaggcaagccagatgcgggttgatatgatcgaaccagtcgtctgaggcgcttaaaacgcagtcttagagaatccagtcatctcctgcaggcccatttcacggcccagcgcggtcattgggtgcacaaccaccagtccgcgaacacttttcttcagcttgcccatatcagcctgctcttttttggtaattgcgcgctgaaacggcatcttcatcagcttctgtgcttctttactcagtttttggctatgaacttcacgcaggcgagcaatttctgcttccagcgtggctttctctttttccagctcggcatatttgtctgcggcttcaaccagcgacagatcggcctgctggtggcggatggcgtccagacgatcgctgagacgtttgatttcgtttttttcgacttctttcatgtgatggcttctgataaagataaatttatagcccctagtatgcgcgaccaggtgctttgttcacaactgatgacattgcaatagttctgtaacgtaatcattaacatgcttaaaaactacgcaatttattgattaattaagaaatctatagaaaaaagataataaacagcagcggatgattattgaggattcagcacgttttccttaatgtcatctttaccgggaacctaaactaaaattggcggccgcgcattcccggcgcggggtaatacggagatatcatcatgggcaaattaggtgaaaacgttccgcttcttatcgataaagccgtagatttcatggcatcaagccaggcgttccgggagtatctgaaaaaacttcctccccgtaacgcgattccgtccggaatacccgatgaaagcgtgccgttatatctacaacgtctggagtattatcgtcggctttatcggccgaagcaggtagaggggcagtaagcagacgttgcttacttttgaaaggctttttttaagctgattctggaaatcagctcagtcagtgaaaggaccattgttgatcgcacagcctgttgatagcgctgaatttgcattgcatacaaactggagtctgctggttcaaactgtggcggcggtggtaacgccgccacgcagtgcagttcaccaaagggtccaaggatctcgtcgtcggtaaaggcgtactcgttgccgtcgtgatttagttcttcacgcaatgccatcagcagctccgcatcttcgtattcctggcggttaatgacgcccaacccgtaaatgagttttaaacgcacagaaagatcgcccagcggaccgtcgccgtcgagtaacggttctacagcatacttcaccgcgtaatcgtctttgcggaatacctgaagcaccagaagatttaccgcctcggtcaaaagctcgacggcggtgatcagaaagcttcgcacggttttgccagcattcagacgctcaagcacacggttttcaaaggcctgggtttgttccattgttgcctgcatatctgacaatctgttattcgggcgcagggtgtcctgcgcctggtccaccattattgcattgctttataagcggttaccgcctcggatacaacctcgctgttggcatcaagatcggaaatctgtgccagcgccgcctgcggacctttgtcagcgatcagtgctgccagttcctgagcctgcggatcatcttcactgcggaagtgcattgcaccagcaatcccctgaatcagattcttgtgcggaaggctgtattccagcgtaccgagcaatggcttgatcagacggtcgccagcactcagtttacgcagcggctgacggcctacgcgctctacatcatctttcagatacgggttctcaaaacgaccgaggattttctggatgtacgccgcatgtttgtctgcgtcaaagccgtagcgcttgatcagtaccgcaccactttcttccatcgcaccttttaccaccgcgcggattttctcgtcgagaatagcgtcacgaatggtctgatgaccggccagttttccgaggtacgcggttatagcatgacccgtgttcagggtgaagagtttacgttcgacaaatgccatcaggttgtcggttaactccatgcctgggatgttcggcagtgcgcctttgaactgcgttttatcgacaatccattcgctgaaagtttctaccgtcacttccagcggatcgttagttgccgaagccgaaggcggtacgatgcggtcaacggcggaatcgacaaagccaacgtgttcttctacccacgctttggcgtcttccggcagggcgttcatcacatggcctttcagctgcgtggtaccgcgtaccatgttttcacaggcgatgatgttcagcggggattcattaccttgttctttgcgtttcaccagccctttggcgatagccggagcaatacgttccagcacaaccgggccaacggcggtagtgactaaatcgacctgagcaatcagatcaacgacatcatcaccaatgctgctgacagcattgacgccggaaacggtatctacctgctcggtttcaccaaccacatgaacctgatagctatgacgggcattcagggcatcaagtaccacctgattgacatcggcaaacgtcagttggatacccgcgtctgccagcagtttaccgataaagccacgaccgatattacctgcgccaaaatgtaatgctttcatagtattaaccttcatcaatgtttttacccgagagggctggggtgaggcttttccctcacccaaaccctctccgtgaggagaggggcagcgccggatgcggcgtaagcgccttatccggcctacaagaacgtgcaaattcaacaaatcgtgatgcatcctgtaggcctgataagcgtagcgcatcaggcaattaaccccaccttctccatgtggagagggtgggattggattacttacgacctgccaacagttccagcacttcatccacgctggtggtgtgtgccagacgctcgatgacggactcatcatccagtgcattggtcaggctggtgataacctgaatgtgctcgttgttacgggctgcaataccaatcaccagacgggcaatgtcatcttcttcttcaccgaagcgcacgccttccgggtactggcagaacaccacgcccgttttcagtacgcgatctttcgcttcaaccgtaccgtgtggcaccgcgatagactcacccagataagtcggggtcagtttttcacgatccagcatcgcctgaacgtattccggctcaacgtaaccgcctttcaccagctgctcgccagcaaaacgaatcgcttcttctttggttgctgctttgcgaccgaggaagatgttctccgcgcccagtttgaacaggttagcactggaatcgtcaaagctgtctttcagactgtctttcactttcacttcgttttcagtatggcgctgggcagcaaccagacgttcggttaggctggtgtacaggccgctgtcgaggaagttggtcagcgaaatatgctgcgcctgcggaacctggcgcatagcgcgttcggtcaggtcacggtgagtgatgacgaggtccacatctggcggcaggttgttgatcgcgctgttagtgaccgaaatctgtgacagacctgcatcctgaattttcttacgcagcacgcctgcgcccatcgcactggaacccataccggcgtcacaggcaacgatgattttacgtacgtggctcaggtcgttagtcacatcgcccgcagacagcggagatgtgcctttagactcagctttcatgtcctgcatacgacgagttgctgcttcaatatcatcttcttctttcactttgctggttttcagcaaaatagcagagacaacgaaggagacagccatcgccgcacacacacccgcgatgttagcgaaataagcaccttttggtgtcatcgccagtacagcaaggatagaacccggagatgccggagaaaccagaccaccgcccaggatagtcagcgtgaacacgccagtcataccgccgaggatgactgcgaggatcagacgcggattcatcagcacatacgggaagtagatttcgtggataccacccaggaagtggatgattgccgcaccgcccgcagactgtttagcgctaccacgaccaaagaacatgtacgccagcagcacgcccatacctggacctgggttagcttcaatcaggaagaagattgatttacccagttcatgggactgctgaatacccagcggcgagaagataccgtggttaatggcgttgttgaggaacaggattttcgccggttcaacaaagatagacgccagcggcagcatgtcatggacaaccatgaagttaacgcccgcagccagcattttggacagggcttcaacaatcgggccaatgccgaggaatgccagaatagcgaggatcatcccgatgatgcctgcggagaagttattcaccagcatctcaaaaccggatttgatcttaccgtctacccagcggtcgaagtgcttaatgcaccagccgcccagcggacctgcaatcatagaaccgaggaacatcggcatgtctgcgccgacgataacgcccatggtggtgatggcaccgactacgccgccacgttcgccgcctaccagcttaccaccggtataaccgatcagcagcggcaggagataagtgatcatcggcccgaccagcttcgccagcgtctcgttcggtaaccaccctgttggaataaataacgcggtgatgataccccacgcgataaacgcgccgatatttggcatcaccatgttgctgaggaaacgaccaaagctttgcactttgatcttaatatcggatgacataaaaacaccccttcttatgtttgctgtcgcgcaggctggaagcccgaggttttttgttaatgtggcggcagaggtagccggaccttgtagatactgcgaaatctggcactgaatcggttaactgtccagtcgacggccttttgtgtgatatcaatcacataaatatagggggtagagaggtaattaacgtgacgttcatcacaaaacgcttgtgtaaaaaagcaacaaggcggcgattttcgctaaaaatggcatttaaatgtgagtagtgtcacatttttgttttgatggtttgttgaatctttgtgatctgaatcacaagatattttcttacggcgttcacctgatgtgatctacagcatgttatgccttcgtcatacaattgttatgtaactaagcaactcatcacctctaaaaattattctttggtgttatggcgagaatcgcgaacccggattattgtcaaaatatcagcctgactcccttctggctgccagcccaaaaacaacactgataaacgtgaatccgaggcagatatgtttctaaactatttcgcgttgggagtgctgatcttcgtctttctggtgattttttatggaatcatcgcgatacatgacatcccttatctgattgccaaaaagcgcaaccatccccatgccgacgctattcatacggcgggctgggtgagcctgtttaccctgcatgttatctggccgttcctgtggatctgggcgacgctctatcaaccggagcgcgggtggggcatgcagtcacatgttgcgtcgcaggagaaagcgactgacccggaaatcgccgcactttctgaccgaatttcccggctagagcatcaactcgccgccgagaaaaagactgactattccacgttcccggagatctaattatggatctattgattgttttaacttacgtggtgctggtgcgtattccgctctattcgatcacggattggcatcgaagttcgatcagcgattcgcatccattcgatcaaccgggaacttaactttttctaccgctttttaactcgttttttcgctgctttccactgtcggggggtttttcctcagggactctccctgaaggaccactctgtgtgagttatgtaccagtctgtccaggatggcatctgctgttgttgggttctccatcagaccatgccatttatctaccgggaactggcttaccactatcgtgctgcttattagaacctgtattttttgcaactgtttcagatatttcagccaactgccatcaacacgtccctgagccaactgttccagtaatcgcccggttctacagtaccggacgctgtatttctgtcgacatgcctgttcgcccagcgcattggctatccagctcttaccgcatcctgtcggaccggttatcagtaggtttttcctgtggattatgtagtagccgttcagcagttccctcatctgttcagcccgcagacctcttgaggccggataacgcagcccttccggtgttgcctgatatttcaggcaggcattttttctcaaccgtgccacacgactgttttctctgctcagaagctcgtcatcaaccagcagtgtcagcctttcctcgaacgacagttcgtcgtaagtctgaggcgtttcccgttgccgtatcaggctcccggccatcgccgggagtttcagttgggtcagtttgtttaacagattatcactcatacggttgttccttctgtcagtggtagtagccaggaccacgcaggttttcatgctctgaagcatatgccggatgttgttcgcccaggcgggataacggaagctcaacgttatcccgatgatgacgcagcagattgtcgataaagcgtctgtccggggcgttatagtgcagggcaacgtaacaggccttttccagccgttccgggccgtattttttctgaagtgccagcagacccaggactgcacggtaagccagctccggatggggtttggctttcagcatggattcaaccacccggcctgtggacggacctgtacggtttccctgctcgataaggcgttccggtgtccatgtcccatgccgccggtggcgttctggcatgtgaagcggattggttgtgtgtttatattcatgtgtgctgcgcggatgttgcgccacacactgccccttgtgccagagctgtaccaccgactgccccaccttcagtgacagacgctgaccgaccagttcgtgtggaacggagtaccagtgacgggcatattcaacgtggtagtcagggccaaccttcacggctttgtattccgtgtattcataaggctccagaggcagcggagagagtgctggtgcatccagcatgcggaagcgttctgcgcgggtttgattaccgtatcccttcattggtcggttattcatgtccgtcagcaactcccgaaggcgtgcattcagcgccctgagcgtgtggaaggtttcattacggatgcgggcaagaagccatagctcgacgatgaggacgccgttttctgcttttggtttatctttaggtttgcgcgggcgggccgggataataaccgtgccatagtgctcagccagcgcctgataactgtcgttgatgacaggctcatagcgatcggcttttttcactgcgcttctgaggttatcggggatgagcagcttcggtacgccgcccaggaaggtcaggcaacggctgtgggcatttaaccatgacatcatgtcctgaccttcgcacgcttcaacataggtatagttggacgcccccattacagccacgaagattgccacgcggcgtatctctccggtgtccggattaataacagggaccgtaggaccacagaagtcgataaagagcttttcgccagcacgatgctcctgtcgcatggagaggcgtcgcgtttttttccacttccggtagcaacggcagaagtgtgagtatcccatcgctttgtcacccgcctgtgccttgtattccatccacaacagttggcgcgtcacgccaggttttctcatttccgtatcgaagtacagcatgtcaggcataacaagctctgacgcagaggtgtctttgggcgggaaaatgagtttctccagcgtgtcatgggatatatccgcaggtaatggccatgacagagaagaggctttgaagcgggcaagaacctcaaaaacggttgaggcgctgatgtgtaacgtcagtccgatacaacggttagtcagcttcttatcgaacttgagctgaaggatcttaaaacaagtttccatagtgctcctggattttctctttttggacattgacgtctccactggtttaaacacggcaatggagactgtggtgaaaagagttaattcccggagtgactggcgaattccaatcaatgatcggaagtatgccaaatcgtgatcgattgtgatgccaaactgtgatcggagatggatgccaaatcatgatcgattcgaatgccaaactgcgatcgattcagatgccattttgcagctggcgtgggcggtctttaaaatctttcgtattccggtgaatcagtggacgctggcgacggcggcgctgggaggcgtgtttctggtgagtggtttgattttgttgatgaactacaaccacccttacacttttaccgcgcaaaaggcagtgatagcgatccctatcacgccacaggtgacgggaattgttactgaagtcactgacaagaataatcagcttattcaaaagggcgaggtgctttttaagctcgacccggttcgttaccaggcgcgagttgacagacttcaggctgacctgatgacggcgacgcataatataaagacgctgcgtgcgcagctcactgaagcgcaggccaacaccacccaggtttcagcggagcgcgaccgtctgtttaaaaattatcaacgttacctgaaaggcagccaggcggcggtgaatccgttctcggaacgtgacatcgacgatgcgcggcaaaatttcctcgcgcaggatgcgctggtgaaaggctcggtggcggagcaggcgcagatccagagccagctcgacagtatggttaacggcgagcaatcgcagattgtgagcttaagagcgcaacttactgaagcaaaatataaccttgagcagactgtcattcgcgcgccgagcaatggctacgttactcaggtactgatccgcccaggtacatacgcagctgccttgccgctgcgtccggtgatggtcttcatccccgagcaaaaacggcaaattgtcgcccaatttcggcaaaactcgctgttacgtctgaaacctggcgatgatgcggaagtggtgtttaacgcgctacctgggcaggtgttccacggcaaattgactagtattttacctgtcgtgccaggcggttcttatcaggcgcagggggtattgcaatcattaacggtcgttcccggcacggacggcgtgctgggaaccattgaactggaccctaacgatgatatcgatgccttacccgacggcatttacgcccaggtagcagtttactccgaccatttcagccatgtttcggtgatgcggaaggtgctgctaagaatgaccagttggatgcattatttgtatttggatcattgagggggaagggggagattatggaactttgctccctgcaagggctaattatttttgcatattacttcattggctgcgatgatttttctttaatattcattatgttaataagttctggatgagtgtgctctcattggattttttatccgtcttgttctgccgcaggatgagactatacatcgtcgagatcgcaatgatgatatgagttgttcctcctgcgacggctctaatcaaaaaagagcaggagtgcttttccatctattgcgatgatggctttattatctgaaggatgacagtcacatttaaaaaatatttaatctatagatcacaatgtagggtcatggaatatatgtatacaactattttcttcttcacttttaattatcgtattcattataaaactaagttaaaaaaactcctagagagtgagttattaatatatttttaaataaaattaagttatcattcatcgatgcattttatagaatcatcaatggccataatagtactattaactctcaattttatatttttatcatcactacaaatattaactgaatttatatcaatgatttttttattcttatcttttattttatttactgtttcaatgcaatcagcggcaagttggagtggatttagatttttcagatatggtcttatgatctttcccttacttaataaatagcatgtataggattcggaaagtccagcatctattttgtacctcattatattagataaggatgtgagaaattccttgttatcattcgcagccatatatgccagtccgagttcagcctctgcggccttacaggcaaaatagcttagtgaacacgcttttcgtccctctttagtactggctgatattagtgcccataatattgctttgtctgccaaatctaactctctctgaaattgtcttgcagtaactgtactcgcagaaatagagaaaaaaatacaattgttaataactttgccatattttttagtccgtaactgttaatgtgctatctggctctgaaaatattaactcatttaatttttgcatgtcattagatgaaccagttatacaaccctcggaacagaatcgaggtcctaaagacggaccgaaagcgtttaaacaactttgtgttaaaaatccatcacgattatatgtttctgtatttgctgacggtactaaacgtataccattaggttttctattggttgctccaggaccattaacattccagctccataccccttgaggtattggacctctattttgtaagtgtgtacaaccaggattatttttacattgcatattattaccattattaccagaggcgacaggaatagtaagcacatcataagagttatcatcattttgcgtatctgaaacgcatgaaagcatacttaaagttatgctgtataaacaggtcgctaatcccaacgggtcaatatcagttatcggattcaacggatactgataaaaattccatccccccttcagtccaatcggatcctgagtgatatatcgcccctgcagcgggtcataatagcggtggcggttgtaatacaggccggactcctcatcatactgctgccccggcaggcggataagctgctgcagctgatgcgggttctcttcattcagcaggttgccccactcatcgtattctgcgcaccattctgttgccccttccgtgctgataagcaccagcggcaggccgcgatggtcgcagtggtacaggtggatttttcgcgccggcgtgtacaccgggtccatctggttttgcatctgctccaccgtcaggccgcacgatgccagccagcggcggctttcctcactcacccggtcagccaggatttcactttccagccggtcgagcatctgcaccagcaccggcgggaacaccacactgccaccgtcttcgccgccggactgctgaagggcatccgccaggctgcggcgctgcgttttcgccagctcaccggtggcagtttcgaccctgatgagtggcgtgaagctccccggctgataaatcgtctggatgcgggttctgtcgttctgtattgtggtcagccggtcgccgtcccagccgtaccaggtcacttgcggtttccgtgacagcgacatccagcccgtcaggtcccgttcacgccgccatacccgttttgccaccctgcggcccagcgggtcgtaaagatagcgactttcgaccagcggctctgcatattgtgtccgcgtgtagtgcaccagccggtgctgactgtcgtaatggtaccggtgggtgcgctcatcatccgtgcggataaccccttccgggatgaggtcggttttctctgtcagtctgccgtgatggtcataccggtaaagatagtgcgcgtcacgggcgatacggttatccggccacatgctgagggtgctgtccgggtgcagctccgggtcgggcaggcggttccccgccgggtctgtggcatacgggatgcggatatccagattcgctgcggtggtgtgaacgccggtcagcctgccggtggtgctgtagctgtaactccgggtctggcgcgggctgctgatgcggatgagttcgccgttgtcgttccaggtgtaatcgcggtcagacagcaggctgttcaggtgctggctctgtaactgcccggcaggggtataagcgatggtgagttcataacggccgaagctgcgcagcgtttcccggtgcaggcggtcgcgggtgtactccaccagcggtgtgtcgccgagtttcatgcctgacagccagccgctgccgtaggtcagccattccacggcggacaggctgtccggtatacagcggttcgccagcccctgcgcgttgtacgcatgtctggtctcatgctgccagagcagtgcttccgtctgcgggtgatgcaccgtctgacgctcaccggtcagccggcctttctcatcatacccgtaatgcaccgtcacccggtgcccttcgctgagatggctgatgtctgtcagccagccgcgttcgtcgtaccgccaccgctctgcggtttcacccttcacggtgcggtgcgtgaggcggtctgcttcgtcatagtgccagtgggtgaccagcccctcatcctcgctgcggataagtttgccggtcaggtcgtggtgataacgctgtgtgcggccgtcaaagccggtttcctgtatcagccggtcgagtacatcgtaacggaaggtggtgtggctgccgttttcactggtcagacggatgacccgtccggcagcatcgtattccatactgcgcgtcagcccgccctgcgtggtacagatggcttttccccacgcatcgtactgtgtcccgtttctgctgccgtccggggcaatgacggcggtcaggtcaccggcggcgttgtattcataccgcatttcatggccctgcgtgtctttcaccgcaattaactgtccacggctgtcgtatgcgcggtactggctcagcccttcctcgcggtgcaccgccgtcacctgaccaaaacggtcatggtcataacgggttacataaccggaacagtcagtgacggtcagcaactgaccgtaacggctccatgtcatggttttccggctgccggtggcatcttccgttgcgcagggtaagtcactgtgtggattatcataacggtagcgggtgatatcgccgtcaggggcggtttcctgaatcagacggccggattcatcatatttgcggcgcatttccagcccgtcaggcccggtggctgacgttaactggctgtggtggttatagtaaaacgccgatgccctgccatccggcgtggtgatgcgcgtgatgaggcccgtcaccacatccgggctgtattctgttgtccggcctgcggcatccgtctgtgtcctgagcctgcccacggcgtcaaactgactctgcgtgacgctgccgtccgcgtgttcctttttcaccacccgcttcagcccggcttcaccctacgtgtgcagcacttcacggcggttcaggctgtcggtgatggtgatgcggtccttctcatactgatacgtgtagcttaagcctgccgggttaagctgttctgtcacccgcccgtcgctgtcgtaacggtaacggatttccggccggcccgtgtgacggtgcgccaccatccggccccggtatttatcatcgtaagtaaagctgcgcacctgtttgccactacggtcatacaccaccgccagttcgccgcgtggcgtccagccatagcgcaccagcggcgcggcaggtaaattctccgggtattccgggtcgtgcgtcagccacacggcagacagatgccgttgtcccggccatattcggtgtaacccggcagggtatcaggaaaagcggacggttccgtcccgccggaaatggcctgctgccgggcttcttctgcccgctgcgcctgcgtggtcagtaccagccggaagtgacgcccggcaccatccgtcacgccggtgatttcgccgctgaattcaccggcggcttcgcggtggaacgtctgtgtgcgcccgaagcggtccaccagcccggtcagtacccggtacggcggcagcggcgcaggcagcacctcatccgcttccggcacccgctcacaccagccgagcagccaccacggcccctgcggactgtttgtcgccagataacgatgcggacttaagcggagttcttccggcagcgcctgccagagtgcggccagccggtgaccttcatccagtttcgccacgccgccgcgcaccagccagagtgattcgctgcggctgtaaccgtcctcaccgggaaacaggtgctcaaaatacaggcttctgccgccgttatcactgagtatcagtgtgttatcgcgcagctgtaagcggatatccgcaggcattttccagccggggccgaggctccccatcggcgcgggcgtttttgtccggtaactgctgtaggtgcgggagaggatgaacggcagcggggcgggcagggcgatgtcggtttcaccgggaaggacctttgcaccgagcaggggattgaccggatggccggacgtcactccgccggggcacaccgaacaggccacaccggtgggggcaccgatgcgcaccccggctgaaccctgaacaatgctaccgccatactgcgtcatgtcgccctgacgcgctgccggttttccgctcatctgctcatccttgttttatcgggttatttgtctgcttccaggcaaaaccctacagatttataagaaagccttaagtgagatatccatcagatagaaacaattaggaaaatatttatatcaccatgataaatatgtgatttatttggaagtaacaaaccatcaacattttctgccctttttcccatcaccaggccatactgatatttttcctcgcacaaaggactcggcatgaaactcgtcggtagctacaccagcccgtttgtacgcaaactttctattctgttgttagaaaagggcataactttcgaatttattaatgaactgccctataacgcggacaacggcgtggcgcaatttaacccgttaggaaaagtgccggtgctggtgaccgaagagggcgaatgctggtttgattcgccgatcatcgctgaatatattgagttaatgaatgtcgctccggcgatgttgccgcgcgatccgctggagtcgttgcgggtgcgcaaaattgaggcgctggcggatggcattatggatgccgggctggtatcggtgcgtgaacaggcgcgtccggcggcgcagcagtctgaagatgaattgttacgccagcgggagaaaatcaaccgcagtctggatgtgctggaaggatatctggtcgatggcacactcaaaaccgatacggtcaatctggcgactatcgccattgcctgtgctgtcggatatctcaatttccgccgcgttgcgccaggttggtgtgtcgaccgcccacacttagtcaaactggtcgaaaacctgtttagccgcgaaagttttgctcgcaccgaaccgccaaaggcttgatgcgcgatatgtcctcctgacccatctcacgttacaatccgtggttatgttaaacgcccttctccgtgtgagagggccttgatcagccaggtttcctatgacaaccgaaacgcgttccctctatagtcaacttccggctattgatcgcttattgcgcgatagctccttcctttctttgcgtgatacttatggtcacacccgcgtggtggaattgttgcgtcagatgctcgacgaagcgcgagaagtgattcgtgacagccagacgcttcctgcgtggtgtgaaaactgggcgcaagaagtcgatgcccggttgacgaaagaggcgcagagcgcgctgcgtccggtgatcaacctgacgggaaccgtgctgcataccaaccttggacgagctttacaggcggaagccgcggtggaagccgttgcgcaggctatgcgttcgccagtgaccctcgagtacgatctggacgacgccggacgcggacatcgcgatcgggcgctggcgcaactgctgtgccgtattacgggggcggaagatgcctgtatcgtcaataacaatgcggcggcggtgttattgatgttggcggccactgccagcgggaaagaggtggtagtatctcgcggcgaattggtggagattggcggcgcgtttcgtattcccgatgttatgcgtcaggcaggctgcaccctacacgaagtagggaccaccaaccgcacgcacgcgaatgattatcgtcaggcggtgaatgaaaataccgcactgttgatgaaagtacataccagtaactacagcattcaggggttcaccaaagcgatagatgaagcggaactggtggcgctcggcaaagagctggatgttcccgtagtgactgatttaggcagtggctcgctggtcgatcttagccagtacggtttgccgaaagagccaatgccgcaggagttgattgcggcgggcgtcagtctggtgagcttctccggcgacaagttgttaggcgggccgcaggcagggattatcgttggtaaaaaagagataatcgcccgcctgcaaagccacccgctgaagcgtgcattacgcgcggataaaatgaccctcgcggcgctggaagccacgttgcgtctttatttacaccctgaagctctgagtgaaaaattaccgaccctgcgcctgcttacccgcagcgcagaggtcattcaaatccaggcacaacgtttacaggctccccttgccgcacattacggcgcggagtttgcggtacaggttatgccatgtctttcgcagattggcagtggttcgctgccggttgatcgcctgccgagcgcggcattaacgtttacaccccatgatggacgcggtagccaccttgagtcattagccgcccgctggcgtgaattgccagtgccgatgattggtcgtatttatgacggacgattgtggctggatttacgctgccttgaagatgagcaacggtttttggagatgttgttgaaatgattattgcgactgccggacacgttgaccacggcaaaacaaccttattgcaggtgattactggcgtaaatgctgaccgtctgccggaagaaaaaaagcgcggcatgaccatcgatctcggctatgcctactggccgcagccggatggtcgcgtgcctagttttatcgacgtacccggtcatgaaaagtttctttccaacatgctggcgggcgttggtggtatcgatcacgcgctgttggtggtggcgtgcgatgacggcgtgatggcgcagacccgtgagcatctggcgattttgcagctgaccggtaacccgatgctgacagtggcgctgaccaaagccgatcgcgtggacgaagcgcgtgttgatgaggttgaacgccaggtaaaggaggtgctgcgggaatacggttttgctgaggcaaaactgtttatcaccgcagcaaccgaaggtcggggaattgatgccctgcgcgagcatctgcttcagttaccaggacgtgaacacgccagccaacatagtgtccgcctcgcgatcgaccgcgcatttaccgtaaaaggtgccgggctggtcgtcaccggtacggcgttaagcggggaagtgaaggtaggcgattcactctggctgactggtgtaaataaaccgatgcgtgtacgtgcgctgcatgcacaaaaccagccaacagaaaccgcccatgccgggcagcgtatcgcgcttaacatcgcgggtgatgcggaaaaagagcagattaaccgtggcgactggctgcttgccgatgcgccgccagagccgttcacacgggtgattgtcgagcttcaaacccatacgccgctgacccagtggcagccgctgcatattcaccacgccgccagccacgttacgggacgcgtttcgctgctggaagataaccttgccgagctggtgttcgacacgccgctgtggctggcggataacgatcgcttagtgctgcgcgatatctcggcccgcaacacgctggcgggggcgcgtgtggtgatgcttaacccgccgcgtcgcggtaaacgtaagccggaatatctgcaatggctggcgtctcttgcacgggcgcagagcgatgccgatgcgttatctgttcatctggaacgcggcgcggttaaccttgcggatttcgcctgggcgcgccagctcaacggcgaagggatgcgcgaattgctgcaacagcctggctatattcaggctggttatagcttgttgaatgcgccggttgccgcccgctggcagcggaaaattctcgacacattagcgacttatcatgagcaacatcgcgatgaacctggtcctgggcgcgaacgtctgcgacgtatggcgttgccaatggaagatgaagcgctggtactgttgctgattgaaaagatgcgcgaaagcggcgacatcctcagtcatcacggttggctgcatctgccggatcacaaagcgggcttcagcgaagagcagcaggccatctggcaaaaagcagagccgctgtttggtgacgagccgtggtgggtgcgtgatctggcaaaagagacgggtaccgacgagcaggcaatgcgcctgacgctacgccaggcggcgcagcaaggaataattaccgcgatcgtcaaagatcgttattaccgtaacgatcggattgtcgaatttgccaatatgatccgcgatctcgatcaggagtgtggttcaacctgcgcggcggatttccgcgatcgcttaggcgtaggccgaaagctggcaattcagattctggaatattttgaccgcattggctttacgcgtcgtcgtggaaatgatcatttattgcgcgacgcattattatttccggaaaaataaggaaatgattaattaatttttaaaataaattaatacaaatttctggtaatgactccaacttattgatagtgttttatgttcagataattcccgatgactttgtcatgcagctccaccgattttgagaacgacagcgacttccgtcccagccgtgccaggtgctgcctcagattcaggttatgccgctcaattcgctgcgtatatcgcttgctgattacgtgcagctttcccttcaggcgggattcatacagcggccagccatccgtcatccatatcaccacgtcaaagggtgacagcaggctcataagacgccccagcgtcgccatagtgcgttcaccgaatacgtgcgcaacaaccgtcttccggagactgtcatacgcgtaaaacagccagcgctggcgcgatttagccccgacatagccccactgttcgtccatttccgcgcagacgatgacgtcactgcccggctgtatgcgcgaggttaccgactgcggcctgagttttttaagtgacgtaaaatcgtgttgaggccaacgcccataatgcgtgcagttgcccggcatccaacgccattcatggccatatcaatgattttctggtgcgtaccgggttgagaagcggtgtaagtgaactgcagttgccatgttttacggcagtgagagcagagatagcgctgatgtccggcagtgcttttgccgttacgcaccaccccgtcagtagctgaacaggagggacagctgatagaaacagaagccactggagcacctcaaaaacaccatcatacactaaatcagtaagttggcagcatcacccaatatgcaagcctattttgaccagctcgatcgcgttcgttatgaaggctcaaaatcctcaaacccgttagcattccgtcactacaatcccgacgaactggtgttgggtaagcgtatggaagagcacttgcgttttgccgcctgctactggcacaccttctgctggaacggggcggacatgtttggtgtgggggcgtttaatcgtccgtggcagcagcctggtgaggcactggcgttggcgaagcgtaaagcagatgtcgcatttgagtttttccacaagttacatgtgccattttattgcttccacgatgtggatgtttcccctgagggcgcgtcgttaaaagagtacatcaataattttgcgcaaatggttgatgtcctggcagccaagcaagaagagagcggcgtgaagctgctgtggggaaccgctaactgctttacaaaccctcgctatggcgcgggtgcggcgacgaacccagatcctgaagtcttcagctgggcggcaacgcaagttgttacagcgatggaagcaacccataaattgggcggtgaaaactatgtcctgtggggtggtcgtgaaggttacgaaacgctgttaaataccgacttgcgtcaggagcgtgaacaactgggccgctttatgcagatggtggttgagcataaacataaaatcggcttccagggcacgttgcttatcgaaccgaaaccgcaagaaccgactaaacatcaatatgattacgatgccgcgacggtctatggcttcctgaaacagtttggtctggaaaaagagattaaactgaacattgaagctaaccacgcgacgctggcaggtcactctttccatcatgaaatagccaccgccattgcgcttggcctgttcggttctgtcgacgccaaccgtggcgatgcgcaactgggctgggacaccgaccagttcccgaacagtgtggaagagaatgcgctggtgatgtatgaaattctcaaagcaggcggtttcaccaccggtggtctgaacttcgatgccaaagtacgtcgtcaaagtactgataaatatgatctgttttacggtcatatcggcgcgatggatacgatggcactggcgctgaaaattgcagcgcgcatgattgaagatggcgagctggataaacgcatcgcgcagcgttattccggctggaatagcgaattgggccagcaaatcctgaaaggccaaatgtcactggcagatttagccaaatatgctcaggaacataatttgtctccggtgcatcagagtggtcgccaggagcaactggaaaatctggtaaatcattatctgttcgacaaataacggctaactgtgcagtccgttggcccggttatcggtagcgataccgggcatttttttaaggaacgatcgatatgtatatcgggatagatcttggcacctcgggcgtaaaagttattttgctcaacgagcagggtgaggtggttgattcgcaaacggaaaagctgaccgtttcgcgcccgcatccactctggtcggaacaagacccggaacagtggtggcaggcaactgatcgcgcaatgaaagctctgggcgatcagcattctctgcaggacgttaaagcattgggtattgccggccagatgcatggagcaaccttactggatgctcaacaacgggtattgcgccctgccattttgtggaacgacgggcgctgtgcgcaagagtgcactttgctggaagcgagagttccgcaatcacgagtgattaccggcaacctgatgatgcccggatttactgcgcctaaattgctatgggttcagcggcatgagccggagatattccgtcaaatcgacaaagtattattaccgaaagattacttgcgtctgcgtatgacgggggagtttgccagcgatatgtctgacgcagctggcaccatgtggctggatgtcgcaaagcgtgactggagtgacgtcatgctgcaggcttgcgacttatctcgtgaccagatgcccgcattatacgaaggcagcgaaattactggtgctttgttacctgaagttgcgaaagcgtggggtatggcgacggtgccagttgtcgcaggcggtggcgacaatgcagctggtgcagttggtgtgggaatggttgatgctaatcaggcaatgttatcgctggggacgtcgggggtctattttgctgtcagcgaagggttcttaagcaagccagaaagcgctgtacacagcttttgccatgcgctaccgcagcgttggcatttaatgtctgtaatgctgagtgcagcatcgtgtctggattgggccgcgaaattaaccggcctgtgcaatgtcccagctttaatcgctgcagctcaacaggctgatgaaagtgtcgagccagtttggtttctgccttatctttccggcgagcgtacaccacacaataatccccaggcgaagggggttttctttggtttgactcatcaacatggccccaatgaactggcgcgagcagtgctggaaggcgtgggttatgcgctggcagatggcatggatgtcgtgcatgcctgcggcattaaaccgcaaagtgttacgttgattggtggcggggcgcgtagtgagtactggcgtcagatgctggcggatatcagcggtcagcagctcgattaccgtacggggggggatgtggggccagcactgggcgcagcaaggctggcgcagattgcggcgaatccagagaaatcgctcattgagttgttgccgcagctaccgttagaacagtcgcatctaccagatgcgcagcgttatgccgcttatcagccacgacgtgaaacgttccgtcgcctctatcagcaacttctgccattaatggcgtaaacgttatcccctgcctgaccgggtgggggataattcacatctatatatctcactaattaattaatatttagtatgaatttattctgaaaatcatttgttaatggcatttttcagttttgtctttcgttggttactcgtaatgtatcgctggtagatatggagatcgttatgaaaacctcaaaaactgtggcaaaactattatttgttgtcggggcgctggtttatctggttgggctatggatctcatgcccattgctaagtggaaaaggctattttcttggcgtgttaatgacagcaacttttggtaactatgcatatcttcgcgcagaaaaactcgggcaactggataatttttttacccatatctgccagttagttgcgttaatcactatcggtctcttgtttatcggtgttttaaatgcacctatcaatgcttatgaaatggtgatctaccccatcgccttttttgtctgcttgtttggtcaaatgcgtttgtttcgctcggtatgagcaacataaagctcttacacattcaggaatgaaaggaatactgtgatggacaacaaaatatcaacctattcaccggcctttagtattgtgtcatggatagctctcgttggtggtatcgttacctatctgttagggctatggaatgcagagatgcagttaaatgaaaaagggtattattttgccgtactggtggatttgcccctatatttccagacatctgttatcacttaacccattacaagcccgctgccgcagatattcccgtggcgagcgataacccagcgcactatgcggatgccattcgttataatgctcgaacgcctctgcaaggttctttgctgccgttaacccgtctggtttgggcatgatactgatgtagtcacgctttatcgttttcacgaagctctctgctattccgttactctccggactccgcaccgccgtgttcttcggttcaagtcccaacatccgggcgaactggcgtgtttcattagcccggtagcatgaaccattatccgtcagccactccactggagacgacggaagatcgttgccgaagcggcgttccaccgctcccagcatgacgtcctgtactgtttcactgttgaagccgccggtagtcaccgcccagtgcagtgcctcacgatcacagcagtccagcgcgaacgtgacacgcagtctctctccgttatcacagcagaactcgaacccgtcagagcaccatcgctgattgctttctttcacggccactctgcctgtatgtgcccgtttcgatggcggtacagcaggttttcgctcaagcaacagcgcattctggcgcatgatccggtaaacacgtttggcattgatcgcaggcataccatcaagttctgcctgtctgcgaagcagcgcccatacccgacgataaccatacgtgggcagctctccgataacatggtgtatacggagaagcacatccgtatcatcagtgtgacgactgcggcggccatccatccagtcatcggttcgtctgagaatgacgtgcaactgcgcacgcgacacccggagacaacggctgactaagcttactccccatccccgggcaataagggcgcgtgcgctatccacttttttgcccgtccatattcaacggcttctttgaggagttcattttccatcgttttcttgccgagcaggcgctggagttctttaatctgcttcatggcggcagcaagttcagaggcaggaacaacctgttctccggcggcgacagcagtaagacttccttcctggtattgcttacgccagagaaataactggctggctgctacaccatgttgccgggcaacgagggagaccgtcatccccggttcaaagctctgctgaacaattgcgatcttttcctgtgtggtacgccgtctgcgtttctccggccctaagacatcaatcatctgtactccaatgactagtctaaaaactagtattaagactatcacttatttaagtgatactggttgtctggagattcagggggccagtctaactggtgttaggactgttttctgctgcgtcttatcaaaagaccgttcgggacaagtatgaaggcataccgaccacttccatttattatatgacctgcctgactgtctttattatctctgttgcattactgaggtagcctgagtttaacggacactccttcctgaaatagaatggcatcagaaggagctaataatgagcagaaaaacccaacgttactctaaagagttcaaagccgaagctgtcagaacggttcctgaaaatcaactttcgatcagtgaaggcgcttcccgattatctcttcctgaagacactttaggacaatgggttaccgccgccagaaaagggctcggtactcctggttcccgcacggtggctgaactggaatctgaaattctgcaactgcgtaaggcgttaaatgaagctcgccttgagcgagatatattaaaaaaagcaacagcgtattttgcacaggagtcgctgaaaaatacgcgttaatcgaacaatggcgacaacaatttcccattgaagcgatgtgtcaggtatttggtgtatccaggagcggttattacaactgggtacagcatgaaccctcagacagaaaacaaagtgatgagcggctaaaactggagattaaggtggcacatatccgcactcgcgaaacatatggaacccggcggctccagacggagctggcagagaatggcatcatcgttggtcgtgaccgactggcacgtcttcgtaaggagctaaggctacgctgtaagcagaaacgcaagttcagagcgactacgaactcgaaccacaatctgccagttgcgccaaatctgctgaaccagacgttcgctcctacagcaccaaatcaggtctgggtggcggacctgacgtatgttgccacacaggagggatggttgtacctcgctggcatcaaagatgtttatacgtgcgaaattgtcggctacgccatgggagagcgcatgacaaaagagctgacaggtaaagccctgtttatggcgctcaggagccagcgcccacctgccgggctaatccaccactctgatcgaggttcacagtactgcgcatacgattaccgggtcatacaggagcagtttggtctgaaaacatcaatgtcgcgtaaaggtaactgttacgacaacgctccgatggaaagcttctggggaacgctgaaaaatgagagcctgagccactatcgttttaataaccgggatgaagccatctcagtaatacgggaatacattgagattttctacaatcgtcagcgtcgtcactctcgtctggggaatatctccccggcagccttcagggaaaaatatcatcagatggctgcttaaaaaaagaacaaatggtagtgtccgctattgccagtacacctcatactgatggtaggtctgtggaatgcgacattattactcagtgaaaaaggtttttatggactggctttcttcttaagcttgtttggtgcagtagcggtgcagaagaatattcgtgatgccggaataaacccgccaaaagaaacacaggttacccaggaagaatacagcgaataattcacgtaagcccggtcagtccaatgtgaacgggcttttacttaactcactaatctgtttctgtcgattcgttgtaccagcatagaaagtaacaaactcgctgccaacgtcgcgcaaaagatccaaataatatccagtattggccaatttttaagctcaattccccgggtgcgcagcgcatggataatcaaggcgtggaatccgtatatacccaatgaatggcgggagattaagccaagtccgcgaatggtacgcgtatccagcgtgtttttaaccagagtcaatagcgcgattgcgcagataaaaaccatcggcccacagtaaagataccaggtatcggcaaaatttccgcgccactgcaattcatataatgtcccgcgagagataataaaaacccccgtcgcaaacagcgcggcgctcacccacgacagtgctttatgctgtgtgtccatcatccctatagcgcggcccaacatgccatacagaatgtagtaaaaagtatcgccattgatatataagttaattggcagccattcaaaaccgtcaattttctgcggcactgtgtttgggttagcgataatgccaatcaccgccattagcaccagcaacatttttccgccgacgttcttcacctgaatcagcggtgaaaccagataaatcaccgcaatcgcgaagaaaaaccacaagtggtaaaacactggcttttgcagcaggtttttcagcgctaactccatattgatggaggtaaacagcgcaatgtagagcagtgcgattgcgctataaaaaatcagacataagccgatacgcaagaaatggcgcggctgggcgctgcgttcgccaaaaaagagatagccggaaatcatgaaaaatagcggcacgctgacacgagaggcagaattcagaacattggcgatatcccatgtgacggggctaacactatgagcattggtcacataccaggtagtggtgtgaatcatcaccaccattaaacacgctatccctcgcaggttatcaatccagtaaattttgggctgcatctgtgtctctgtatctggttaaaaaaagtctgaccgataaatcatttggttggcgcactggaataatctgagttttatcactacagcttatagaggcttaaggaaattcgtaagatatcagccactataccgatataaataataagactcacctgcaaaccagacggtaatttaatgatgatgaacgctttctttccggcaatggcgcttatggtgctagtgggttggtctacaccgtcacccgtgcagaaagcacaacgggtaaaggttgatcctctgcgttcgttgaatatggaagcgttatgcaaggatcaggcggcaaaacgttataacaccggcgagcaaaaaatcgacgtcaccgccttcgaacagttccagggaagctatgaaatgcgcggttataccttccgtaaagagcagtttgtctgttcttttgacgcagatggccattttttgcatctttccatgcgttaagccctgctttttcccgtttcgtactgtatatcttccatccagcgggtatactgatcccttcctttaaatccacacgtatccagcacgaaataatatgcaaaagtttgataccaggaccttccagggcttgatcctgaccttacaggattactgggctcgccagggctgcaccattgttcaaccattggacatggaagtcggcgcgggaacctctcacccaatgacctgtctgcgcgcgctggggccagaaccgatggcggctgcttatgttcagccttctcgtcgcccgaccgatggtcgctacggcgaaaaccccaaccgtttacagcactactatcagttccaggtggtcattaagccatcgccggacaatattcaggagctgtacctcggttctctgaaagagctgggcatggacccgactattcacgacatccgtttcgtggaagataactgggaaaacccgactctgggtgcctggggactgggctgggaagtgtggctaaacggcatggaagtgacgcagttcacttacttccagcaggttggtggtctggagtgtaaaccggttaccggcgagatcacctacggtctggaacgtctggccatgtacattcagggcgtagacagcgtttacgacctggtctggagcgacggcccgctgggtaaaaccacctacggcgacgtgttccatcagaacgaagtggagcagtccacttacaacttcgaatacgcggatgtggatttcctgttcacctgcttcgagcagtacgagaaagaagcgcagcagctgctggcgctggaaaatccgctgccgctgccagcctacgagcgtattctgaaagccgcccacagcttcaacctgctggatgcgcgtaaagccatctccgtcactgagcgtcagcgctacattctgcgcattcgcaccctgaccaaagcagtggcagaagcatactacgcttcccgtgaagccctcggcttcccgatgtgcaacaaagataagtaagaggcggctatgtctgagaaaacttttctggtggaaatcggcactgaagagctgccaccaaaagcactgcgcagcctggctgagtcctttgctgcgaactttactgcggagctggataacgctggcctcgcacacggcaccgttcaatggtttgctgctccgcgtcgtctggcgttgaaagtagctaacctggcggaagcgcaaccagatcgtgaaatcgaaaaacgcggcccggcgattgcccaggcgttcgacgctgaaggcaaaccgagcaaagcggcagaaggttgggcgcgtggttgcggtattaccgttgaccaggctgagcgtctgactaccgataaaggcgaatggctgctgtatcgcgcccatgtgaagggcgaaagcactgaagcactactgccgaatatggttgcgacttcgctggcgaaactgccgatcccgaaactgatgcgttggggcgcaagcgacgtgcacttcgtgcgtccggtgcacaccgtgaccctgctgctgggcgacaaagtcattccggcaaccattctgggcattcagtccgatcgcgtgattcgcggccaccgctttatgggcgaaccggaattcaccatcgacaacgccgatcagtatccggaaattctgcgtgagcgcgggaaagtcatcgccgattacgaagaacgtaaagcgaagattaaagccgatgccgaagaagcagcgcgtaagattggcggtaacgctgacttaagcgaaagcctgctggaagaagtggcttcgctggtggagtggccggtcgttctgaccgcaaaattcgaagagaaattcctcgcggtgccggctgaagccctggtttacaccatgaaaggtgaccagaaatacttcccggtgtatgcgaacgatggcaaactgctgccgaacttcatcttcgttgccaacatcgaatcgaaagatccgcagcaaattatctctggtaacgagaaagtcgttcgtccacgtctggcggatgccgagttcttcttcaataccgaccgtaaaaaacgtctggaagataacctgccgcgcctgcaaaccgtgctgttccagcaacagctgggtacgctgcgtgacaaaactgaccgcatccaggcgctggctggctggattgctgaacagattggcgctgacgttaaccacgcaacccgtgcgggcctgctgtctaagtgtgacctgatgaccaacatggtcttcgagttcaccgacacccaaggcgttatggggatgcactacgcgcgtcacgatggcgaagcggaagacgtagccgtcgcgctgaatgagcagtatcagccgcgctttgccggtgatgacctgccgtccaacccggtagcttgtgcgctggcgattgctgataagatggatactctggcgggtatcttcggtatcggtcagcatccgaaaggcgacaaagacccgtttgcgctgcgtcgtgccgcacttggcgtgctgcgaattatcgttgagaagaacctcaaccttgatctgcaaacgctgaccgaagaagcagtgcgtctgtatggcgataagctgactaacgccaacgtagttgatgatgttatcgactttatgctcggtcgcttccgcgcctggtatcaggacgaaggttacaccgttgacaccatccaggcggtactggcgcgtcgtccgactcgtccggctgatttcgatgcccgtatgaaagcggtatcgcatttccgtaccctggatgcagctgctgcactggcggcggcgaacaaacgtgtatctaacattctggcgaaatctgacgaagtgctgagcgaccgcgtgaatgcctctaccctgaaagagccggaagaaattaaactggcgatgcaggttgtggtgctacgtgacaagctggagccgtactttgcggaaggtcgttaccaggatgcgctggtcgaactggcagagctgcgtgagccggttgatgctttcttcgataaagtgatggtcatggttgatgacaaagaattgcgtctcaaccgtctgaccatgctggagaaactgcgcgaactgttcctgcgcgttgcggatatttcgctgttgcagtaataacgccgttattaaaaagcctgccatctggcaggctttttttattatcgctaaataatacagcaacctttaataatcttctgttgaataaagattatctcatatattaattttatgaggtttttttaggattatatcaaggagaagaaacaaacttattaagctagaatagccacgggtgcttgagactgtttgtctcaggtattcaccgaaaggcagacagagaaaagccccacctgactataaatcaaagtgaggctaccctatgcctgaacaccataaggttagcctcttactcgttggaaatcaacacaggaggctgggaatgccgcagaaatatagattactttctttaatagtgatttgtttcacgcttttatttttcacctggatgataagagattcactgtgtgaattgcatattaaacaggagagttatgagctggcggcatttttagcctgcaatttgaaagagtaagagtctttggcgggaagttattcccgcctttcttacggcgttgcgcattctcattgcacccaaatttattcttcacaaaaataatactaaattttattacgcgatcgattatttatttcctgaaaaacaaataaaaaaatccccgccaaatggcagggatcttagattctgtgcttttaagcagagattacaggctggttacgttaccagctgccgggcctttagcgccgctttcgatggtgaaggacactttctgaccttcgtccagagatttgtaaccatcgttctggatagcagagaagtgtacgaacacatctttagagccatcgtcaggagtgatgaagccgaagcctttgtcagcgttgaaccattttacgataccagtcattttaccggacatagtgtattacctttaataattaagtgtgcctttcggcgatatggcgtgctttacagattttgaagcgttaaaggaatgtgcactacgaggggtatcaacgataactcttgaagggacttgccttactacactgctttaatggtctgtacgtcaaaccgttgatgtgcattaagccacgcattggcgggtgatgcaacaattatttttcatatttatgattaatcggttggaaaacggtcctgtcatcaggaccgtaaacagcaataaagtggataaaagtctattccatcaactgcttacttaatgccgggttggcttgaatcaaacgcatcaattttagttcggcacttgaaggcttcacgcgtctggattcccattcctttaccatggcgactgatacgcccaaaacccgggcgaaatcatcgatttttaaccctgtcccttttcgtaactgctcaatttcggtacaggacgttgttctgtgcgtcagggtaattttctgcgtttcatctttaaaaacaatctgttccaggctgctcaacagctcatgcattggatctttatattccattgaaaactcctcaaatcacactgcgggatcgtgaattgcatcgaagctcattaagaatagtcgggaaaagcagacacagcggggtgaagtcagggcatgctctggctatgattcgattcagcctgtcatttagcgtgacttatagccacctaacgatctgataaatgccgatatatctcttaccactcctgttttgtaaagatttcgaaaatctaaccttctgcgaaggcgtaaatctctggctacaaaaaaggcaacggcactatcattttttaacaatgaaacaacaaattaaccttgtttcattttctccatgattttaccaggaagattacgtagaaagggtatcctgcaagcctgtcctggactatccttgtcacgtcagacacgcgtgtgtcgttgtgcgctttttttgggtgaaaggagtaagaaaatggcgacaggaaagtcctgctctcgctggtttgcgcctcttgcggcgttattaatggtagttagcctgagtgggtgttttgataaagaaggcgatcagcgtaaagcgtttatcgacttcctgcagaatacagtgatgcgtagcggtgaacgtctaccaaccctgactgccgatcagaaaaaacagtttggtccttttgtctctgattacgcgattctgtatggttattctcagcaggtgaatcaggcgatggattctggtctgcgcccggtcgtagacagcgttaacgcaattcgcgtaccgcaggattacgttacgcaaagcggtccgctgcgtgaaatgaatggttcgctgggtgtgctggcgcaacaactgcaaaatgcgaagttgcaggccgatgctgcgcactctgcgctaaaacagagcgatgacctgaaaccggtatttgatcaggcattcaccaaagtggtaacgacgccagctgatgcattgcaaccgttgattccggcggcacaaactttcacgcaacaactggtgatggttggagactacattgctcagcaaggtactcaggtgagctttgtcgcaaatggcatccagttcccgacttcacagcaggcaagtgaatataacaaactgattgcgccattaccggcacaacatcaggcgtttaatcaggcctggactacagcagttactgcaacccaataaagagtaaaagcccgagcgattatcgggctttacttcacgcagtcgcggcttagtccgcgacgtgaggattcacacagttcttctcaacctttccttgtaacgcatcaattaaattatccacggcacaggcggccatgccataacgcgtctcatgggtggcagatccaatatgcggtactgcgacgacgttggccattgagagcaacggcgaatctacggacagtggctcttgttcgaagacatcaagcccggcggcgtgaatttcccctttctgtaatgctgcgatcagtgcattttcgtcaaccaccgggccacgtccggcattaatgaaaatggcggaggatttcattttggcgaattgttctgcgccaaacagatgatgcgtctcatcagttaacggcaggatcaggcaaacgaaatctgactcttgtaacagtgtatccaaatcgcagtagcgggcgttgaagcgttcttctgcttctttatggtggcggcgcgcgttatagaggatgggcatgttgaagccaaagtgcgcacgttgtgccagcgccataccgatccgtcccatcccgacaatgcccagtgttttatggtgaacgtcagtgccgtaccagtccgggcctatgctcgcggtccattcgcctgcttttacccgttctgctacctccacaacccgacgagcggtagacaacaccagcgccatcagcgtatcggcgacggtttctgttaatacggttggcgtgtgcatcagcagaatttttcgggcggtaagcgcatcgacatcaaaattgtcatagccgacggagatcgttgatgtggcatgcagtttcggcattttttccagcaatgcggcatcaacattctcgtttgaacccagtaaaccttcagcttcggcaaaaattgctgcattttgttcgacggtttgtgggctgaggtttgccacctggtgaacggtgaaatgctcttgcaggcgttgcagtaaatcatcaggtaaggctttgtagaggataacggacggcttcatgcttctctccattcactgataaggcgatcaccttagcctgaaatatgatgaaggaaaactgaagaatgccaggtgatttctgcatcacctggcatgaaagggattacagcgggcttaaggtaatttctacacggcggttttgcgccttaccttctgcggtgctgttgctggcgattgggttagccgggccaaggccctgagtacggatgcggctggcgtccacgccctgggtgatcaacgcgctggcaacggaatccgcacgctgctgggagagacgcatgttcaggtcgtgaccccccgtgctgtcggtataaccaatcacgttaaccgccgttttcggatactctgtcagcaccattgccacgccggtcagggtgttagcgcctgccggtttcagggtcgcgctgctgctgtcgaaggtcacattgttcggcatattgaggataatgttatccccgctgcgggttacgctaacaccagtgccgcgcattttgtcacgcagcttcgcttcctgcacatccatgtaataacccacgccgccgcccagagctgcgcctgctgctgcgccaatcagcgcgcctttaccgcgatctttcttcgaagaagagagcgcaccaatacccgcgcccacgagagagcccagacctgcgccgatagcagatttgcctgcttcgcgttcgccggtgtaagggttagttgtgcagccagataccgccagagcgccactcactacggcggcaataagataaacacgtttcttcattgttaatccttaataacctttttattctttgccacgggttccgtggcgggagattatgccgcgtgaacatgaagatgaggtgtactggcaatagcggacactaccatttgttctttttttaagcagccatctgatgatatttttccctgaaggctgccggggagatattccccagacgagagtgacgacgctgacgattgtagaaaatctcaatgtattcccgtattactgagatggcttcatcccggttattaaaacgatagtggctcaggctctcatttttcagcgttccccagaagctttccatcggagcgttgtcgtaacagttacctttacgcgacattgatgttttcagaccagactgctcctgtatgacccggtaatcgtatgcgcagtactgtgaacctcgatcagagtggtggattagcccggcaggtgggcgctggctcctgagcgccataaacagggctttacctgtcagctcttttgtcatgcgctctcccatggcgtagccgacaatttcgcacgtataaacatctttgatgccagcgaggtacaaccatccctcctgtgtggcaacatacgtcaggtccgccacccagacctgatttggtgctgtaggagcgaacgtctggttcagcagatttggcgcaactggcagattgtggttcgagttcgtagtcgctctgaacttgcgtttctgcttacagcgtagccttagctccttacgaagacgtgccagtcggtcacgaccaacaatgatgccattctctgccagctccgtctggagccgccgggttccatatgtttcgcgagtgcggatatgtgccaccttaatctccagttttagccgctcatcactttgttttctgtctgagggttcatgctgtacccagttgtaataaccgctcctggatacaccaaatacctgacacatcgcttcaatgggaaattgttgtcgcccattgttcgattaacgcgtatttttcagcgactcctgtgcaaaatacgctgttgctttttttaatatatctcgctcaaggcgagcttcatttaacgccttacgcagttgcagaatttcagattccagttcagccaccgtgcgggaaccaggagtaccgagcccttttctggcggcggtaacccattgtcctaaagtgccttcaggaagagataatcgggaagcgccttcactgatcgaaagttgattttcaagaaccgttctgacagcttcggctttgaactctttagagtaacgttgggtttttctgctcattattagctccttctgatgccattctatttcaggaaggagtgtccgttaaactcaggctacctcaagattattcctgggaatactcggaaatttgtaagtaatatttaactgctcaatacatctaacctttcaggagtcttcggtttggccaactcatcctcacgatattccgttctgactgccgcccactgggggcccatgctggttgaaaccgacggcgaaaccgtgtttagctcgcgtggcgcgttagccacaggaatggaaaactccttgcagagcgcggttcgcgaccaggttcacagcaatacgcgggtacgatttccaatggtgcgcaaaggctttctcgcgtcaccggaaaacccgcaaggcattcgtgggcaggatgaatttgttcgcgtgagttgggatgaggcgctggatcttattcaccaacaacataaacgcattcgtgaggcttatggtccggcatcgatttttgctggttcctacggctggcgttcaaacggcgtgctgcataaggcctcgacattattacaacgctatatggcgctggcaggcggttataccgggcatctgggggattattcgaccggtgcggcacaggcgatcatgccgtatgtcgtaggtggcagcgaagtttatcaacagcaaaccagttggccgctggtgctggaacatagcgatgtcgtggtgttgtggagtgctaacccactcaatacgctgaaaattgcgtggaatgcatccgatgagcaggggctttcttacttttccgcactgcgtgacagtgggaaaaagctgatctgcattgatccaatgcgatcggaaaccgtcgatttctttggcgataaaatggagtgggtggcaccgcacatgggcaccgatgttgcgctgatgctggggatcgcccatacgctggtggaaaatggttggcacgacgaagcgtttctggcgcgttgcaccacaggttatgccgtcttcgcctcttatttgctgggcgagagtgacggaatagcgaaaaccgccgaatgggcagcagagatttgtggtgttggcgcagcgaaaatccgccagctggcggctattttccaccaaaataccaccatgctgatggcaggctggggaatgcagcgccaacagtttggtgagcaaaaacactggatgatcgtcacgctggcagcaatgttggggcaaatcggcacacccggcggcggttttggtctttcttaccattttgccaatggtggtaaccccacgcggcgttctgcggtgctctcttccatgcagggcagcttgccgggtggctgcgatgcggtggataaaatccctgttgcccgcattgttgaagcactggaaaaccctggtggcgcatatcaacacaacggtatgaaccgacatttcccggatattcgttttatctggtgggcgggcggtgccaactttactcatcatcaggataccaatcgtctgatccgtgcctggcaaaaaccggagctggtggtgatctctgaatgcttctggacggcggcggcgaaacacgcggatatcgttctgcctgcgactacctcttttgagcgtaatgatctcaccatgaccggtgattacagtaatcagcatctggtgccgatgaagcaagtggtgccgccacgctatgaagcgcgtaatgattttgatgtttttgccgagttgagtgaacgttgggagaagggcggctatgcgcggtttacggaaggaaaaagtcagctgcaatggctggaaacgttttataacgttgcccggcagcgcggggcaagccagcaggttgaattgccgccatttgctgagttctggcaagccaaccagttaattgagatgccggaaaacccggacagcgagcggtttattcgcttcgctgatttttgccgcgatccgctggcgcatccgttaaaaaccgccagcggcaagattgaaatcttctcacagcgtattgccgattacggttacccggattgccctgggcatccaatgtggctggagccggacgaatggcagggcaatgccgaaccagaacagttgcaggtactttctgcccatccggcgcaccgcctgcacagccagctgaattacagttctctgcgcgaattgtacgcggtagcaaaccgtgagcctgtcaccattcatcctgacgatgctcaggcgcgcggcataaccgaaggggatatggtgcgggtgtggaactcccgtgggcagatccttgccggagcggtcattagcgagggaattaaacctggcgtgatttgcattcacgaaggggcatggccggatctggatttaaccgctgacggtatttgtaaaaacggcgcagtgaacgtgctgaccaaagatctccccagctcgcggctggggaatggctgtgcgggtaatacggcgctggcatggctggaaaaatacaacggtccggaactgacacttacagcgtttgaaccaccggccagctcataatccaggtgggtagttgggtttcatcctgccatgcgcaatcgacaatgtgaaaaccctgcgcacggtaaaaatctatcgccggttgatttttttgataaacctccagcatcagatggggatagcgctgctgcacatactgcatcagcgccttaccaataccgcgtctgacggccttcggtgcgacaaacattgctgccagaaatcggccttccataatgctgacaaaaccgagaagcttaccgtcctcttcccagacccagttttgcgcgttggcaagataggcatcccgcaccagcggaatgcagtcacgccagtaattcgcttttataaagggatgcccccaggttgtactttccagccacagttcgaggatcgcggggagttctgaacgttgcgcttcccgaatcatggtttatttcccggatagcaacagcagccaaccacatgatcattcaccagcccacatgcctgcataaaggagtaacagattgtggtgccgacaaacttaaaaccacgttttttcagtgctttagatagggcgtcggaggcggacgtagatgtgggaatttcgctcaacgttgtggcttgtgtcacctgtggctgatgatttacaaacgaccagacaaagtcggcaaacggttcgccgttctgttccatttgcaggtacgcccgcgcattaccaataattgcctgaattttccctcgatggcggataatcccggcgtcctgtaccagtctttcgacatcctcttcctgcattgctgcgaccttcaccggatcgaactgatgaaagcaggcgcgatagttttcgcgttttttgaggacggtgatccacgataacccagcctgctgcccttcaaggcagatcatttcgaacagttttttactgtcagtttcaggcacgccccattcattatcatggtaggcaatataaagcgggtcctgactcacccagccgcaacgttccatactttccctcgctatgtacccgatcgtaaaaatttcagccgcttttcttgacgcatcggtgaaaaagtcaatatttaatacagggctactatgcccgatatccttcatacaatgacaataatattgccgaattcggctcttccctggagtcgtgttaatgatcataaaaaaaagcggtggtcgctggcagctaagcctgctggcgagcgtggtaatcagtgccttttttctcaacacagcttacgcctggcaacaagaatatatcgttgatacgcaacccggacattccacagagcgttacacctgggatagtgatcatcaacctaattacaacgatattttgtcgcaacgtattcaaagtagccaaagggcgctgggactggaagtcaatctggcggaagaaactcctgtggatgtgaccagcagtatgagtatgggctggaattttcctttatatgaacaggttacaaccggcccggtcgcggcattacattacgatggcacaaccacctcgatgtataacgagtttggcgacagtactaccacgcagaccgatccgttatggcatgccagcgtgagtaccttaggctggcgtgttgactcccggcttggcgatctccgaccctgggcgcaaatcagctataaccagcaatttggcgagaatatctggaaggcgcaatcaggcctgagccggatgacggcgacaaaccagaacggcaactggctggatgtcaccgtaggcgctgatatgttgctcaatcaaaatattgccgcctatgccgcgctaactcaggcagaaaataccactaataatagcgactatctgtatacgatgggggttagcgccagattttaacgtaacagtcacaattaaaaccattaaataacaataattgtggcgatagtgggtgctaacttaccaaataataaatttggtgaataattgtcgcgtcattcattcctgaactaaggcatttcattccgttctgatggcatttcatgccgtttttccccaggcataaagtgcacttcgttatggttgtcggcagagatttttcctttttattactgcaggaatactgccatgacaccttcaaattatcagcgtacccgctggctgacactcatcggtactatcattacccagtttgcgctggggtcggtttatacctggagcctgtttaatggcgcgctttccgccaagctggatgcgccggtaagccaggtcgctttctctttcggcttgttaagtctggggctggcaatttcgtcttctgttgcgggcaaattacaggaacgttttggcgttaaacgcgtcaccatggcttccggcattttgctgggattaggcttcttcctgaccgcgcattccaacaacctgatgatgctgtggttaagcgccggtgtgctggtcggtctggcggatggcgcgggttacctgctgacgctctctaactgcgtgaagtggttcccggagcgtaaaggtctgatctccgcgttcgctatcggttcttatggtctgggtagcctgggtttcaaatttatcgacacgcagctgctcgaaacggtgggtctggaaaaaacatttgtgatttggggagcgattgcgctggtgatgattgttttcggcgcaacgttaatgaaagacgcaccaaaacaggaagtgaaaaccagcaatggtgtggtggagaaagattacacgctggcagagtcgatgcgtaaaccgcagtactggatgttagcggtaatgttcctgactgcctgcatgagcggcctgtacgtgattggggtagcgaaagatatcgcccaaagtctggcacaccttgatgtggtttccgcagccaatgcagtaacggttatttccatcgctaacctttcaggtcgtctggtgctgggcattctgtctgacaaaattgcccgtatccgtgttatcaccattggtcaggtgatttcgctggtgggtatggcggccctgctgtttgcaccattaaatgcagtgacgttctttgcagcgattgcctgcgtggcatttaactttggcggcactattaccgtctttccatcactggtcagtgagttcttcggcctcaataacctggcgaaaaactacggtgtgatttacctcggtttcggtatcggtagcatttttggttcgattatcgcctcactgtttggcggtttctatgtgaccttctacgtgattttcgccctgctgattctgtcattggcgctttctacgacgattcgtcagccagagcagaaaatgttgcgtgaggcgcatggctccctttaatgctcagccgcgagctactgggcttcagcttccgtgtgcatcaaacgcatcaacgaaatgtataaacaatgactcgtaaaatttgggccagttaactggccctttttactgctttttgtaacgctaaagtctcttttcaaacttgcatttttgtaaatttgtgcttcatgcacactctttccccacactttttcgctttgctgtggtctacttattcgcgcgtgtagattttacttatctgactacctccgcacttttcccctgccgggcctgaaaagccgttaagcagggtgttatcacctgtttgtccagggtttgtttgcatgagatacatcaaatcgattacacagcagaagctgagctttttgcttgcaatctatattggcctttttatgaatggcgcggttttttatcgccgcttcggcagctatgcgcacgattttaccgtctggaaaggcgtttctgctgttgttgaactggccgccaccgtactggtgaccttctttttactacgtcttctatcgctgtttggccgccgcagctggcgtattctggcgtcgctggtggtgctcttttccgcaggtgccagctattacatgaccttccttaatgtggtcattggttatggcatcatcgcttccgtcatgaccaccgatatcgacctgtcaaaagaagttgttggtctgaactttattctctggttaatcgccgttagtgcattgcctcttatccttatctggaataaccgctgtcgctacaccttgctccgacaactgcgaaccccagggcagcgtattcgcagcctggcggtcgtcgtactggcgggtattatggtttgggcaccgattcgtttgctggatatccagcagaagaaagtggagagggcgaccggcgttgatttgccgagttatggcggtgtcgtagcgaactcttatctgccatcaaactggctttctgcgttggggctgtatgcctgggcgcgggtcgatgaatcttccgataataattcattgcttaatccggcgaagaagtttacataccaggctccacaaaacgttgatgatacttatgtcgtgtttatcatcggtgaaaccacgcgttgggaccatatgggtattttcggctatgagcgtaataccacgccgaaactggcccaggagaaaaatctggcggcgttccgtggttactcctgtgataccgcaaccaaactctcactgcgttgcatgtttgtacgtcaggggggcgcggaagataatccgcagcgcacattaaaagaacagaacattttcgcggttctgaagcagttaggattcagttctgacctctacgctatgcagagcgaaatgtggttctacagcaacacgatggcggacaacattgcttatcgtgagcagattggtgcggagccacgtaatcgtggcaagccggtagatgatatgttgctggtagacgaaatgcagcaatcgctagggcgcaacccggatggtaagcatctgatcattctgcataccaaaggttcgcattttaactacacccagcgttatccgcgtagcttcgcgcagtggaagccggaatgtattggtgttgatagcggctgtaccaaagcgcagatgatcaactcctatgacaactcggtgacctatgtggatcactttatctccagcgtgattgatcaggttcgcgataagaaagcgattgtgttctacgcagctgaccacggtgagtcaattaatgaacgcgagcacctgcacggcacgccgcgtgaactggcaccgccggagcagttccgcgtaccgatgatggtctggatgtcagataaatatctggaaaatccggccaatgcgcaggcgtttgcgcagctgaaaaaagaagccgacatgaaagtgccacgccgtcacgtagagctgtacgacaccatcatgggttgtcttggctatacttcaccggatggtggaattaacgaaaacaacaactggtgtcacatcccgcagacaaaagaggcagcggctaactaagaggcctgctgactttctcgccgatcaaaaggcattttgctattaagggattgacgagggcgtatctgcgcagtaagatgcgccccgcattcggtgattggcgcagcttggtagcgcacttcgttcgggacgaaggggtcggaggttcgaatcctctatcaccgaccaaattcgaaaagcctgctcagcgagcaggcttttttgcatttgaagcccatgaggatgagaacctccgggggcggggaggttcgactcgagcgaagcgagagaacgttgcgccagcaacggcccgcagggcgagccacgaagtggcgagtaatcctctatcaccgaccaaattcgaaaagcctgctcaacgagcaggcttttttgcatttgtagctcatgaggatgagaacctccgggggcagggaggttcgactcgacgtaggcctgataagacgcgccagcgtcgcatcaggcaacggcaccgcatttattgtcggatgcggcgcgaccgccttattcgaccaacacaccacacattttcctgccaactttgcgccccatatctcactatccattaacggatttgtgacagaaaccattgtctttttttatatttgcttaaatctttttttgcgttacttatggctggcgctggcattttccgctgtgcgttttagcgttcatggtattaatcgctcagatatccaccttttcctcagatttttttcattaaatgcataaaacttaatcaccaaatgttgctaaatattaagctgattgttctggttatgttggagtagcacaaatttctctgctgcaaatagctgtttgaagtttttttaatctttgtttgtggattctcaccgttggtgtaaatcccggttggctgtattgacgttttcacattctgttgacagattgtaggtcacgaggggcattttatggaggatccgcactgttacactgatgttaattagtacggcatccccacctcataacgttgacccgaccgggcaaaaaacaaaaaaggtcaggcagcgacaacccactgcaaagggttaaaacaacaaacatcacaattggagcagaataatgcgtatttccttgaaaaagtcagggatgctgaagcttggtctcagcctggtggctatgaccgtcgcagcaagtgttcaggctaaaactctggtttattgctcagaaggatctccggaagggtttaacccgcagctgtttacctccggcaccacctatgacgcctcttccgtaccgctttataaccgcctggttgaatttaaaatcggcaccactgaagtgatcccgggcctcgctgaaaagtgggaagtcagcgaagacggtaaaacctataccttccatctgcgtaaaggtgtgaagtggcacgacaataaagaattcaaaccgacgcgtgaactgaacgccgatgacgtggtgttctcgttcgaccgtcagaaaaacgcgcaaaacccgtaccataaagtctctggcggcagctacgaatacttcgaaggcatgggcttgccggagctgatcagtgaagtgaaaaaggtggacgacaacacagttcagttcgtactgactcgcccggaagcgccgttcctcgctgatctggcaatggacttcgcctctattctgtcaaaagaatatgctgatgcgatgatgaaagccggtacaccggaaaaactggacctcaacccaatcggaaccggtccgttccagttacagcagtaccaaaaagattcccgtatccgctacaaagcgtttgatggctactggggcaccaaaccgcagatcgatacgctggttttctctattacccctgatgcttccgtgcgttacgcgaaattgcagaagaatgaatgccaggtgatgccgtacccgaacccggcagacatcgctcgcatgaagcaggataaatccatcaacctgatggaaatgccggggctgaacgtcggctacctctcctataacgtgcagaaaaaaccgctggatgacgtgaaagttcgccaggcactgacctacgcggtgaacaaagacgcgatcatcaaagcggtttatcagggcgcgggtgtatcagcgaaaaacctgatcccgccaaccatgtggggctataacgacgacgttcaggattacacctacgatcctgaaaaagcgaaagccttgctgaaagaagcgggtctggaaaaaggtttctccatcgacctgtgggcgatgccggtacaacgtccgtataacccgaacgctcgccgcatggcggagatgattcaggcagactgggcgaaagtgggcgtgcaggccaaaatcgtcacctacgaatggggtgagtacctcaagcgtgcgaaagatggcgaacatcagacggtaatgatgggctggactggcgataacggggacccggataacttcttcgccaccctgttcagctgcgccgcctctgaacaaggttctaactactcaaaatggtgctacaaaccgtttgaagatctgattcaaccggcgcgtgctaccgacgaccataacaaacgcgttgaactgtacaagcaagcgcaggtggtgatgcacgatcagactccggcactgatcatcgctcactccaccgtgtttgaaccggtacgcaaagaagtcaaaggctatgtggttgatccattaggcaaacatcacttcgaaaacgtctctatcgaataattaaaagccatacaagactgatggcaaaggcaaaactgcctgatgtgctccgcttatcaggcctacgaaaattctgcaatgtattgaatttgcacgattttgtaggccggataaggcgttaacgccgcatccggcataaacaaagcgcactttgtcaacaatctgtatacccggtggcgctgtgcctctgcgtgcagcgccatccggcagcaatacttcattccctgtccgataagggcgggaattgatttgtgagcaatacagacacgcagttccaggctgcgggtcactatagagaatccgggttatgttgcagtttattctccgacgtttgggactcgtcatccccacgtttatcggtattacccttctcacatttgcctttgtccacatgatcccgggcgatccggtgatgatcatggcaggcgaacgcgggatctcccctgagcgtcacgcgcagctgctggctgaactcggcttagataaaccgatgtggcagcagtatctccattacatttggggcgtaatgcacggcgatctaggcatttcaatgaaaagccgaattccagtatgggaagagttcgtgccgcgctttcaggccacgctggaacttggcgtctgcgcgatgatttttgctacggcagtcggtattccggttggtgtgctggctgcggttaaacgcggttccattttcgatcacactgcagttggcctggcgctgaccggctactcgatgccgatcttctggtggggcatgatgctgatcatgctggtttcggtgcactggaacctgacgcccgtctccggtcgcgtgagcgatatggtgttcctcgatgactccaatccgttaaccggttttatgctgatcgacaccgccatctggggtgaagatggcaactttatcgacgccgttgcccatatgatcttaccggctattgtgctgggtactatcccgctggcggttatcgttcgtatgacgcgctcttcgatgctggaagtgctgggtgaagattacatccgcaccgcgcgcgccaaagggttgacccgcatgcgggtgattatcgtccatgcgctgcgtaacgcgatgctgccggtagtgaccgttatcggcctgcaggtgggaacattgctggcgggggcgattctgaccgaaaccatcttctcgtggcccggtctgggacgctggttgattgacgcactgcaacgccgcgactatccggtagtgcagggcggcgtattgctggtggcgacgatgattatcctcgtcaacctgctggtcgatctgctgtacggcgtggtgaacccgcgtattcgtcataagaagtaaggggacatcatgtcacaggttactgaaaataaagtgattagcgcaccggtgccgatgaccccgttacaggagttctggcactattttaaacgcaacaaaggcgcggttgtcgggctggtttacatcgtcatcgtgctgtttatcacgatctttgccaactggattgcgccttataacccggcggatcagttccgcgatgcgctgctcgccccgccagcctggcaggaaggcggcagcatggcgcacttgctgggcaccgatgacgtaggccgtgatgtgctgtcgcggctgatgtacggcgcgcgcttgtcgctgctggttggctgtctggtggtggtgttatcgctgattatgggcgttattctcggcctgatcgccggttacttcggcggcctggtcgataacatcatcatgcgcgtggtcgatatcatgctggcgctgccaagtctgctgttggcactggtgctggtggcgattttcggcccgtcgattggtaacgccgcgctggcactgaccttcgttgccttgccgcactatgtgcgcttaacccgcgccgccgtgctggtggaggtgaatcgcgattacgttaccgcgtctcgcgtggcaggtgccggggcgatgcgtcagatgtttattaacatcttcccgaactgcctggcgccgctgattgttcaggcgtcgctcggtttctctaacgccattctcgatatggccgcccttggcttcctcggcatgggagcgcagccgccaacaccagagtggggcaccatgctctccgacgtgttgcagttcgcgcaaagcgcctggtgggtcgtgaccttcccgggtctggcgatcctgctgacggtgctggcatttaacctgatgggtgacggtctgcgtgacgcgctcgatcccaaactgaagcagtaagaggttcgagatggcgttattaaatgtagataaattatcggtgcatttcggcgacgaaagcgcaccgttccgcgccgtagaccgcatcagctacagcgtaaaacagggcgaagtggtcgggattgtgggtgagtctggctccggtaagtcggtcagttcactggcgattatggggctgattgattatccgggccgcgtaatggcggaaaagctggtgtttaacggtcaggatttgcagcgtatatcagaaaaagagcgccgcaacctggtgggtgccgaagtggcgatgatcttccaggacccgatgaccagccttaacccgtgctacaccgtgggtttccagatcatggaagcgattaaggtgcatcagggcggtaataagagcactcgccgtcagcgggcgattgacctgctgaatcaggtcggtattcccgatccggcatcgcgtctggatgtttacccgcatcagctttccggcggcatgagccagcgcgtgatgatcgccatggcgattgcctgtcggccaaaactgctgattgccgatgagccgaccactgcgctggacgtgaccattcaggcgcaaatcatcgaactgttgctggagctacagcagaaagagaacatggcgctggtgttaattacccatgatctggcgctggtggcggaagctgcgcataaaatcattgtgatgtatgcaggccaggtggtggaaacgggcgatgcgcacgccatcttccatgcgccgcgtcacccgtatactcaggcattgctgcgtgcgctgccagaatttgctcaggacaaagaacgtctggcgtcgttgccaggtgtcgttcccggcaagtacgaccgcccgaacggctgcctgcttaacccgcgctgcccctatgccactgacagatgtcgcgctgaagaaccggcgctgaatatgctcgctgacgggcgccagtccaaatgccattacccacttgatgatgccgggaggccgacactatgagtacgcaagaggccaccctgcaacaaccgctgttgcaggctatcgacctgaaaaaacattatccggtgaagaaaggcatgttcgcgccggaacgtctggttaaagcgctggatggcgtttcgtttaaccttgaacgtggcaaaacgctggcagtagtgggcgaatctggctgcggtaaatcgaccctcggtcggttgctgacgatgattgaaacgcccaccggtggcgagctgtattaccaggggcaggatctgcttaagcacgatccgcaggcgcagaagctgcgtcggcagaaaatccagatcgtcttccagaacccttacggttcgctgaatccgcgtaaaaaagtcgggcaaattcttgaagagccgctgctgatcaacaccagcttaagcaaagaacagcgtcgggaaaaagccctgtcgatgatggcgaaagtcggcctgaaaaccgagcactatgaccgctatccgcatatgttctccggcggtcagcgtcagcgtatcgccatcgcccgtggtctgatgctcgacccggatgtggtgattgccgatgaaccggtttccgcgctggatgtttcagtgcgcgcgcaggtgctgaatctgatgatggatttgcagcaggagttggggctgtcttatgtctttatctcccacgacctgtcggtggtggagcacattgctgatgaagtgatggtgatgtacctgggccgctgcgtggagaagggaacgaaagaccaaatcttcaataacccgcgccatccgtacactcaggcgctactttccgcgacgccgcgcctgaacccggacgatcgccgcgagcgcatcaagctcagcggtgaactaccaagcccactgaatccaccgccgggttgcgccttcaacgcccgctgtcgtcggcgcttcggcccctgcacccagttgcagccgcagctaaaagactacggcggtcaactggtagcttgttttgctgttgatcaggatgaaaatccgcagcgttaactcacaaaaccggggccatgcgctccggtttactcaatcagcttcaacagtggcgacaagcatagcaaaatgccgtacagcagaatcagccaggctttaaatccgcgaagtttttccagttgtgcgactttatagatcaggaaaaacggaatgaggcacgacacaataccatataacgggcttcccaactgaaagaacaccagcaccgatacacgaaacgaaacccaaatcgtcaacgtaatgacgataaaagcgcagatcgccagagtcagcacgcgtgagttaattttcttggtatcaataattcggcttaacagattgagaataatgcctttaatggcctcgtggaaaccgagataaatgccaaagaatgcggtcagtacggcaaagatattaagcaccgtagaggtgatatgaatgatatgcccagggatcacctgcgcggccagcgccagtgctgagatattttgttcaaaggcagaaacggcttcttcgtggctaattgagaaggtaaacgaaaaggcaaaaaacaggatcaccgcgatgagcgtgatataactaattcggtgggtacgcagcgcgagccgggttgccagtactttatccgcttcccgtttacgataggcaatattcattgggttaagtacctgaataaatactgcagaaaagaagcaaaatggaatggtaagcaagacatcgcggaaaaagacggaggcttgcgggaaggcggttatattggcgaaattccagtgcgggatcatcgcaaaaccgaacacgacaataatccctactttgaccaccaccattggcccggaaatcttaaacagtaatcgttcaccaccagacgcaatcgccaccagtacggcgaaaatagcgactttataaagtagagattgtgaaagatcggcatcggttaaaccgaaggttttcaggtacgaggcgctgtcgaaaaccacggagagagagtagataaaaatcccgtggataatcatcaaaaagtagataaccccgaggaaaattccccagttcttccccaggtaatgactgataatatcggtgtagtcattacaggaatcgctttcagaaagggtttttaaataaatgtcctgcactacccaggtggcaggataagcaatgatcgctgcggtaataaatacccaaattcccttcaagccaatttgtactggcatcagcacggttccggcaccaatcgccatgcctatgcataataaaacccagccgaagtcgtagcgtgtaaacggcaatttctgattgtgtttcgatagtgtgttgtgctgcataaagtcctgtccagaaagaagtcggcctcgcaaaaatgaataaacccagtttctcttgcgcaacaggtggagaagtcgaatacgcagtatgtaaaaaatgaggcaacagattcactggggaggtcgcgaggaggcgcaattctacaaaattgcgcatttcactaccagtctggagtcagcccggatatgaactgcaactattgcaaataaagaaattaagctggaaggcatcgcgcaatgaggaagattgccgggtgctgacagtaaaaagcaatcgtaaaatcagcggcaagccgaaagggttccggtgaggcgcaatgttgcgggggctttatccctggtggcattggttgctggagagagaaaacccccgcacgttgcaggtatgtacctgacaacataacgggggctaatcttgaacctagaccactcaagaatagccgcgaaacgttgtcattacaacacaggcggctatatgacgctcgcagagctgggcatggccttctggcatgatttagcggctccggtcattgctggcattcttgccagtatgatcgtgaactggctgaacaagcggaagtagcgtgtcatgtgggcgtcaggctgccgtaatggcaatttgcgcccggaccaggccgcaggagtgaaactctgcggcctttttcgtaagaaaaatgcaacggttgcaagcggataatattctgcggaatgcgcagcacagagtgaagatgagacggattccggaacagaaaaacagtcgtagaatcagcgtcaagccggaaggattccggtgaggcgcaatgttgcgggggcttaatccctggtggcattggttgctggagagagaaaacccccgcacgttgcaggtatgcacctgacaacaccacgggggccattcttgcatccaaacaatacaagaatagccgcgaaacgttgtcattacaatacaggcggctatatgacgctcgcagaactgggcatggccttctggcatgatttagcggctccggtcattgctggtattcttgccagtatgatcgtgaactggctgaacaagcggaagtaacgtgccatgcgggcgtcaggctgccgtaatggcaatttgcgcccggatcaggccgcaggggtgaaactctgcggcctttttcgtaagaaaaatgcaacggttgcaagcggataatattctgcggaatgcgcagcacagagtgaagacgtgacggattccggaacagaaaaacagtcgtagaatcagcgtcaagccggaagggttccggtgaggcgcaatgttgcgggggctttatccctggtggcattggttgctggagagagaaaacccccgcacgttgcaggtatgcacctgacaacatcacgggggccattcttgaacctgaacaactcaagaatagccgcgaaacgttgtcattacaacacaggcggctatatgacgctcgcagaactgggcatggccttctggcatgatttagcggctccggtcattgctggcattcttgccagtatgatcgtgaactggctgaacaagcggaagtagcgtgtcatgtgggcgtcaggctgccgtaatggcaatttgcgcccggaccaggccgcaggagtgaaactctgcggcctttttcgtaagaaaaatgcaacggttgcaagcggataatattctgcggaatgcgcagcacagagtgaagatgagacggattccggaacagaaaaacagtcgtagaatcagcgtcaagccggaaggattccggtgaggcgcaatgttgcgggggcttaatccctggtggcattggttgctggagagagaaaccccccgcacgttgcaggtatgcacctgacaacaccacgggggccattcttgcatccaaacaatacaagaatagccgcgaaacgttgtcattacaatacaggcggctatatgacgctcgcagaactgggcatggccttctggcatgatttagcggctccggtcattgctggtattcttgccagtatgatcgtgaactggctgaacaagcggaagtaacgtgccatgcgggcgtcaggctgccgtaatggcaatttgcgcccggatcaggccgcaggggtgaaactctgcggcctttttcgtaagaaaaatgcaacggttgcaagcggataatattctgcggaatgcgcagcacagagtgaagacgtgacggattccggaacagaaaaacagtcgtagaatcagcgtcaagccggaagggttccggtgaggcgcaatgttgcgggggctttatccctggtggcattggttgctggagagagaaaacccccgcacgttgcaggtatgcacctgacaacatcacgggggccattcttgaacctgaacaactcaagaatagccgcgaaacgttgtcattacaacacaggcggctatatgacgctcgcagaactgggcatggccttctggcatgatttagcggctccggtcattgctggcattcttgccagtatgatcgtgaactggctgaacaagcggaagtaacgtgtcatgcgggcgtcaggctgccgtaatggcaatttgcgcccggaccaggccgcaggggtgaaactctgcggcctttttcgtaagaaaaatgcaacgattgcacgcggataatattctgcggaatgcgcagcacagagtgaagacgtgacggattccggaacagaaaaacagtcgtagaatcagcggcaagccggaaaggttccggtgaggcgcaatgttgcgggggctttatccctggtggcattggttgctggagagagaaaacccccgcacgttgcaggtatgcacctgacaacatcacgggggctaatcttgaacccaaacaactcaagaatagccgcgaaacgttggcattacaacacaggcggctatatgacgctcgcagaactgggcatggccttctggcatgatttagcggctccggtcattgctggcattcttgccagtatgatcgtgaactggctgaataagcggaagtaacgtgtcatgcgggcgtcaggctgccgtaatggcaatttgcgcccggatcaggccgcagaggttaaactctgcggcctttttcgtgcttactgcgggtaaggcacccagtcgccgccgttcaggcgaacgtacggtttatcctggtattgaataactactgcatttgagttctcggagaccggtgctgtttgtggcaacccactggtgagttttttccagtcaacattgtcttcggtgaaaatcttgccatcaagaacgcgaaccaccagatcggagatagctaggaagctgctcggttggtcaatgacaatcggtgccccctgatgtggtgccttcatgccgaagaatttcaccccaacggggacgtctgtgatagacgggctagggatatcacgtaggccagatacctgcattctgtcgcccttcagcgcgccgccgtgttccggcaccacgaccaccatcactttacgacccgatttctccagttcagtaaagaaggcgtccagttcatcaaagaatttctgcgcccgcgctttgtaatccgctgttttgctgacccccggataatggttgccgtcatgcagtggaagcgtgttgtagaacgtggcactacggctgtttttatctttttcggtaacgtccagccagcggttaagcacggcggtatcgtcataaaccggcgaaccatcaaagcccagcaaaataaccggcagatttgtttgatccatcaattcagtctgcatgccgccattttcgcgaacttctttcaaaaaaccgccgaactggccgttatgtcccatcatcaggtgctgggtaaagcccagtttcgaaaggttatcaaacagatagcagtcgttatttgccggttgatacagattagtgtgcgaagtctgcccgcagctggcgcgcagtaaacggatcgccgccgggccactgtaggaggtggcggagttaaagttcttgaactcaatatcgaaatgcgaccacagtggatgcgacatcaacccggcggcttctatatccgaccaggaaagcgaacagatgttaatcaccagtagttcaaatggctgagcatcagcgggcagcgaagacgggaaggtcgatttacgtttcgcctccgcgttatagaaattattcagccaggcgttaaggttcgccgttgttggcggtgcagtttgtgcgggcatatcacccactaccgatgcgccacccgtcgccgcaacggttgccgctgcgttaccacccgtcgttgttacagtggtcgtcggttgtccggctggccacaaggagaaacttggtcccgccagggtaagtacgttcagccatagcagtatggcaaccacaaaaacggtaatgcgaatccattgtgacaggaataaccaggccactaataaaacaaaaatggccccaatcatctgccagttaataaagcgtgtgacaaggtcgattaaataatcggtactgaaccccgccacctgcgaaccctggctcattatgctttccgggccaggcaaccaggtgtcatgccagaacaaagcaaagccgatcggcagggcaatccagtggcgcaagcgatgcaggctgtagcgcggaatgggcatcagcagaaacgtggcaaacaccaaattgaggagcggatggaagttaagatatcccgcccacaacaggccgaacttaaccagaaaatagaagttccagccggaaaggccgcgccagtattgccagagggaagaaggcatggcggtattttgcgtaaattgagtcattttttggttgccctggctttttccgtgcggcgtaacgtcccggccggtttaacataacgaggtttagcaaagaataaacgtaaggtgtcgcgaatgcgtcgcaaagagtgccgcgccagatagcccagcgggaaaaatatcagtgcgcaaacgacaataatttcaatgatatcgctgatggtcatcatgatgagcgctccacagcatcatctaacagtcgcatgggttctggtattcgtcgccagtggcgaccatcgtgctcggcattgatgaccggtttagaactttgcgttaaaggcagcggcatgccccattgttctggggcaagcaagcgcatctgcaccagctcggcactgatttgatcatcttcaaaccagaccatacggtttgagaaaatgtcgccagtaggcaatgggaaaatatgattcaacgcggtatccagatcgttaatccgacagaatgagagaaacagcaccagccgattaccgccaatggtcatgatatcgccggtacggttagggcgacacagcgtcagggcttgttcaacgcggatacccggtaccggacgtagggcaaccagaacgcctttaccgtgggcaggtaatagagggttattcatcatgttgttgacggcattacagaacacatcccacttctggaaaccacgcagtttgagcggctgggtcattgacagcaaggtagtgatatcttccggcacatagcgactaaacttctgcccttgcacgctttcgatcatcgtcagacaacgggagagtggcgcattccacggaataaccatatttgcaccgcaggccaataacaaacgttcatcggtggcgcgcaggctagcggtattttcccgcacgaggattttcatcgcactaccgcgctggcgacgcagggtatgaatgctgcgggccagtggctcgatttgcgcattttgctgtaaagaaaagaccaccgtcgccgcctgagcggtacgggcttcattgaacaggacttcgttattgttgaacagttgccagtgttccgatagcggcggcgcaccttccagtacagcaacattactcagaatgcgtttttcgtcgctgcgtggttggatctccgcctcttcgctttgaactaatgtccagataccattttgttgctgaacgctaagctgctgacgggcgctgacccctttttcgttgcaccagaaggcaatatccagcaaatgttggtcaccctgaaaacgcaaactggcaagaccaaaaagtgaacggtattcctcaagcaacaatgaaaattgtttatcgttattatttccgggattaattaccaaaagcgaacaatggtttaacctgctccatttattcattttatccaaccatgagcgaagccgctcggcaggaatgttttgccatgcgttatttgcgcaaacaagaataaaaaggtaattatggggatcaatagaacactgcaaatcacgggccaaatagtatagacctttttcatgatttagcattgaaaataattttattttttccggcccttgagaatcatctaattgaaagattttcgccggatcgctgtccatgctaatgaccgcgacgtgtgcggtttcagcctgggatgcaattgtttgattcgccagactgatagcatcttcatggcgatcgacgttaaaccaccagacgccgcctgctggcatatgtcgcagctcatcccataatgatgagataccgatagagaatacagggtccacaatgtccctcatgtcaccattttgtctgattatcagtttactagcgaaagctggtaatgactccaacttattgatagtgttttatgttcagataatgcccgatgactttgtcatgcagctccaccgattttgagaacgacagcgacttccgtcccagccgtgccaggtgctgcctcagattcaggttatgccgctcaattcgctgcgtatatcgcttgctgattacgtgcagctttcccttcaggcgggattcatacagcggccagccatccgtcatccatatcaccacgtcaaagggtgacagcaggctcataagacgccccagcgtcgccatagtgcgttcaccgaatacgtgcgcaacaaccgtcttccggagactgtcatacgcgtaaaacagccagcgctggcgcgatttagccccgacatagccccactgttcgtccatttccgcgcagacgatgacgtcactgcccggctgtatgcgcgaggttaccgactgcggcctgagttttttaagtgacgtaaaatcgtgttgaggccaacgcccataatgcgtgcagttgcccggcatccaacgccattcatggccatatcaatgattttctggtgcgtaccgggttgagaagcggtgtaagtgaactgcagttgccatgttttacggcagtgagagcagagatagcgctgatgtccggcagtgcttttgccgttacgcaccaccccgtcagtagctgaacaggagggacagctgatagaaacagaagccactggagcacctcaaaaacaccatcatacactaaatcagtaagttggcagcatcacccagatttagcttgtgaatcaatttagaaggtcacaagacgtgtgattttagtcttttcgtttttaactttttctgttgcgtaacggaaagtcaaaaagtgagcaaattcccgtctcgccgtaaacaataaaccggcgaaatgctcacggttagaattgtttcatgaacggtacggttatttcatagggatcaagcaaaatgaataacaatgaaccagatactctgcctgatcccgcgataggctatatcttccagaatgatattgtggcgttaaagcaggcattttcactgcctgatattgattatgccgatatttcccaacgcgaacagttggccgcggcattaaaacgctggccgttgctggcagagtttgcgcaacaaaagtaggggattggtgaatggccgtactgggattgcagggggtgcggggaggcgtggggacaacaaccatcaccgccgcattagcctggtcattacaaatgttgggagaaaatgtcctggtggtcgatgcctgcccggacaacttgttgcgcctgtcatttaatgttgattttacccaccgtcagggctgggccagagcgatgctggatggccaggactggcgtgacgctgggttgcgctacacctcgcagctcgatttgctgccttttggtcagttatccattgaagaacaagaaaatccacagcactggcaaacccggctgagcgatatttgctccggcttacagcaactaaaagccagcgggcgttaccagtggattttaatcgacttaccgcgtgatgcctcgcagataacccaccagctgctgagtttgtgcgatcactcgctggcaatcgtcaatgtggatgccaactgccatatccgactgcatcagcaagcgctgccggatggcgcacatattttgattaatgacttccgtattggcagtcaggttcaggacgatatttaccagctttggttgcaaagccagcgccgattactgccgatgctcattcatcgtgatgaagcgatggctgaatgcctggcggctaagcaaccagtaggtgaatatcgcagtgatgcgctggcggctgaagagatactgacgctggcgaactggtgcctgttgaactactccgggctgaaaacgccagtcgggagtgcatcatgagtatcctgacccggtggttgcttatcccgccggtcaacgcgcggcttatcgggcgttatcgcgattatcgtcgtcacggtgcgtcggctttcagcgcgacgctcggctgtttctggatgatcctggcctggatttttattccgctggagcacccgcgctagcagcgtattcgcgcagaacataaaaacctgtatccgcatatcaacgcctcgcgtccgcgtccgctggacccggtccgttatctcattcaaacatgctggttactgatcggtacatcgcgcaaagaaacgccgaaaccgcgcaggcgggcattttcaggtctgcagaatattcgtggacgttaccatcaatagatgaacgagctgcctgagcgcgttagccataaaacacagcatcttgatgagaaaaaagagctcggtcatttgagtgccggggcgcggcggttgatcctcggtatcatcgtcaccttctcgctgattctggcgttaatctgcgttactcaaccgtttaacccgctggcgcagtttatcttcctgatgctgctgtggggtgtagcgctgatcgtacggcggatgccggggcgcttctcggcgctaatgttgattgtgctgtcgctgaccgtttcttgccgttatatctggtggcgttacacctctacgctgaactgggacgatccggtcagcctggtgtgcgggcttattctgctcttcgctgaaacgtacgcgtggattgtgctggtgctcggctacttccaggtagtatggccgctgaatcgtcagccggtgccattgccgaaggatatgtcgctgtggccgtcagtggatatctttgtcccgacttacaacgaaaatctcaatgtggtgaaaaataccatttacgcctcgctgggtatcgactggccgaaagacaaactgaacatctggatcctcgatgacggcggcagggaagagtttcgccagtttgcgcaaaacgtgggggtgaaatatatcgcccgcaccactcatgaacatgcgaaagcgggcaacatcaacaatgcgctgaaatatgccaaaggcgagttcgtgtcgattttcgactgcgaccacgtaccaacgcgatcgttcctgcaaatgaccatgggctggttcctgaaagagaaacagctggcgatgatgcagactccacaccacttcttctcgccggacccgtttgaacgcaacctgggacgttttcgtaaaacgccgaacgaaggcacgctgttctatggtctggtgcaggatggcaacgatatgtgggacgccactttcttctgcggttcctatgcggtgattcgtcgtaagccgctggatgaaattggcggcattgctgtcgaaaccgtgactgaagatgcgcatacttctctgcgtttgcaccgtcgtggctatacctccgcgtatatgcgtattccgcaggcggcggggctggcgaccgaaagtctgtcggcgcatatcggtcagcgtattcgctgggcgcgcgggatggtacaaatcttccgtctcgataacccgctcaccggtaaaggactgaagtttgctcagcggctgtgctacgtcaacgccatgttccacttcttgtcgggcattccacggctgatcttcctgactgcgccgctggcgttcctgctgcttcatgcctacatcatctatgcgccagcgttgatgatcgccctattcgtgctgccgcatatgatccatgccagcctgaccaactcgaagatccagggcaaatatcgccactctttttggagtgaaatctacgaaacggtgctggcgtggtatatcgcaccaccgacgctggtggcgctgattaacccgcacaaaggcaaatttaacgtcaccgccaaaggtggactggtggaagaagagtacgtcgactgggtgatctcgcggccctacatcttccttgttctactcaacctggtgggcgttgcggtaggcatctggcgctacttctatggcccgccaaccgagatgctcaccgtggtcgtcagtatggtgtgggtgttctacaacctgattgttcttggcggcgcagttgcggtatcggtagaaagcaaacaggtacgccgatcgcaccgcgtggagatgacgatgcccgcggcaattgcccgcgaagatggtcacctcttctcgtgtaccgttcaggatttctccgacggtggtttggggatcaagatcaacggtcaggcgcagattctggaagggcagaaagtgaatctgttgcttaaacgcggtcagcaggaatacgtcttcccgacccaggtggcgcgcgtgatgggtaatgaagttgggctgaaattaatgccgctcaccacccagcaacatatcgattttgtgcagtgtacgtttgcccgtgcggatacatgggcgctctggcaggacagctacccggaagataagccgctggaaagtctgctggatattctgaagctcggcttccgtggctaccgccatctggcggagtttgcgccttcttcggtgaagggcatattccgtgtgctgacttctctggtttcctgggttgtatcgtttattccgcgccacccggagcggagcgaaacggcacaaccatcggatcaggctttggctcaacaatgatgataacgcgatgaaaagaaaactattctggatttgtgcagtggctatggggatgagtgcgttcccctctttcatgacgcaggcgacgccagcaacgcaaccactgatcaatgctgagccagctgtagccgcccagacggaacaaaatccgcaggtggggcaagtgatgccgggcgtgcagggcgctgatgcgccagtcgtggcgcagaacggtccttcgcgtgatgtgaagctgacctttgcgcaaattgcgccgccgccgggcagcatggtgctacgtggcattaacccgaacggcagcattgagtttggtatgcgcagcgatgaagtggtgacgaaggcgatgctcaacctcgaatacacgccatcgccatcgttactgcctgtccagtcgcagttaaaggtttatctcaatgatgagctgatgggcgtgctgccagtgaccaaagaacagttgggtaaaaaaacgctggcgcaaatgcccattaacccactgtttattaccgacttcaaccgtgtgcggctggagtttgtcggccattatcaggacgtgtgcgaaaacccggccagcaccacgctttggctggatgttgggcggagcagtggactggatctgacctatcagaccctgaatgtgaagagtgacctgtcacacttcccggtgccattctttgacccgcgcgataaccgtactaacaccttgccgatggtctttgcgggtgcgccggatgttgggctgcaacaagcatctgccattgtcgcctcgtggtttggttcgcgttctggctggcgtgggcagaacttcccggtgctctataaccaattgccggatcgcaatgccattgtctttgcaaccaacgacaaacggccggacttcctgcgcgatcatccggcggtaaaagccccggtgattgagatgattaaccatccgcagaatccttacgtcaaactgctggtggtgtttggtcgtgacgacaaagacctgttgcaggcagcgaaaggtatcgctcagggtaacattctgttccgtggtgaaagcgtggtagtgaatgaagtgaaaccgctgctaccgcgtaagccgtacgatgcgccgaactgggtacgtaccgatcgtccggtcacatttggcgaactgaaaacctatgaagaacagttacaatccagcggtcttgagccagcagcgattaacgtttcgctaaacctgccgccggatctctacctgatgcgcagtaccggcattgatatggatattaattaccgctacaccatgccgccggtgaaagacagttcgcggatggatatcagcctgaataaccagttcctgcaatccttcaacctgagcagtaaacaggaggcgaaccgcctgctgctgcggattccggtattacaaggtttgctggatggcaaaacggatgtctctattccggcgctgaaactgggcgcgaccaaccagctgcgcttcgactttgagtatatgaacccgatgccgggcggttcggtggataactgtattaccttccagccggtgcagaatcatgtggtgattggtgacgattccaccatcgacttctcgaagtattaccacttcatcccgatgccggatctacgcgcctttgctaacgcgggcttcccgttcagccggatggcggatctgtcgcaaaccatcaccgtgatgccgaaaacgcctaacgaagcacagatggaaacgttgctgaatactgttggttttatcggcgcacagacgggcttcccggcgattaatctgacggtgaccgatgatggcagcaccattcagggcaaagatgccgacatcatgatcatcggtggtatcccggacaaattaaaagacgataagcagatcgacctgttggtgcaggcgaccgaaagctgggtgaaaacaccgatgcgccagaccccgttccccggcattgtgccggacgagagcgatcgcgcggcagaaacccagtcaacgctgacctcttccggtgcgatggcggcggtgattggcttccagtcgccgtataacgaccagcgcagcgtgattgcgctgctggcagatagcccacgcggttatgaaatgcttaacgatgcggtgaacgatagcggcaaacgcgccaccatgttcggttcggtcgcggtgctccgcgagtccggtatcaacagcctacgtgttggcgacgtttattacgtaggtcatctgccgtggttcgagcgcttgtggtatgcgctggcaaaccatccgattctgctggcggtgctggcggcaatcagtgtgatattgctggcatgggtactgtggcgtctgctgcgaattattagtcgtcgtcgtcttaacccggataacgagtaattgaagatgaatgtgttgcgtagtggaatcgtgacgatgctgctgttggctgcctttagtgttcaggcagcctgtacctggcctgcctgggagcagtttaaaaaggattacatcagtcaggaagggcgcgtcatcgcccccagcgacgcgcgcaaaatcaccacctccgaagggcaaagttacggtatgttctttgccctggcggctaacgaccgtgtagctttcgataatattctcgactggacgcagaacaatctcgctcagggctctttaaaagaacgtttgcccgcctggctgtggggcaagaaagagaacagtaagtgggaagtgctggacagcaattcggcctccgatggtgatgtctggatggcctggtcgttgctggaggcggggcgtttgtggaaagagcagcgttataccgacatcggcagcgcgttgctaaaacgtatcgcgcgggaggaagtggtgacggtgcctgggctgggttccatgttgttaccgggcaaagtgggttttgctgaggataacagctggcgttttaaccccagctacctgccgccgacgctggcgcagtatttcacccgctttggcgcgccgtggaccacgctgcgcgaaaccaatcaacgtttattgctggaaaccgccccgaaaggtttttcgccagactgggtgcgctatgagaaagacaaaggctggcagctaaaagccgaaaaaacattgatcagcagctacgacgctatccgcgtttacatgtgggtaggcatgatgcctgacagcgatccgcaaaaagcgcggatgctcaaccggtttaaaccgatggcgacattcactgagaaaaacggttatccgccggaaaaagtggatgtggctacggggaaagcgcagggtaaaggaccgatcggtttttctgccgccatgctgccctttttacaaaaccgcgatgcgcaggccgttcagcgccagcgcgtggccgataactttcccggcagcgatgcctattacaactatgtgctgaccctgtttggacaaggctgggatcaacaccgtttccgcttctcgacaaaaggtgagttattacctgactggggccaggaatgcgcaaattcacactaaacatattcacgctttccctcggtctggccgtcatgccgatggtcgaggcagcaccaaccgctcagcaacagttgctggagcaagttcggttaggcgaagcgacccatcgtgaagatctggtgcaacagtcgttatatcggctggaacttattgatccgaataacccggacgtcgttgccgcccgtttccgttctttgttacgtcagggcgatattgatggcgcgcaaaaacagctcgatcggctgtcgcagttagcgccgagttcaaatgcgtataaatcgtcgcggactacgatgctactttccacgccggatggtcgtcaggcactgcaacaggcacgattgcaggcgacgaccggtcatgcagaagaagctgtggcgagttacaacaaactattcaacggtgcgccgccggaaggtgacattgctgtcgagtactggagtacggtggcgaaaattccggctcgccgtggcgaagcgattaatcagttaaaacgcatcaatgcggatgcaccgggcaatacgggcctgcaaaacaatctggcgctattgctgtttagtagcgatcgccgtgacgaaggttttgccgtcctggaacagatggcaaaatcgaacgccgggcgcgaaggggcctctaaaatctggtacgggcagattaaagacatgcccgtcagtgatgccagtgtgtcggcgctgaaaaaatatctctcgatctttagtgatggcgatagcgtggcggctgcgcaatcgcaactggcagaacagcaaaaacagctggccgatcctgctttccgcgctcgtgcgcaaggtttagcggcggtggactctggtatggcgggtaaagccattcccgaactacaacaggcggtgcgggcgaacccgaaagacagtgaagctctgggggcgctgggccaggcgtattctcagaaaggcgatcgcgccaatgcagtggcgaatctggaaaaagccctcgcactggacccgcacagcagcaacaacgacaaatggaacagtctgctgaaagtaaaccgctactggctggcgatccagcagggcgatgctgcgctgaaagccaataatcctgaccgggcagaacgcctgttccagcaggcgcgtaatgtcgataacaccgacagttatgcagtgctggggctgggcgatgtggcgatggcgcgaaaagattatcccgccgccgaacgttattatcagcagaccttgcgtatggacagcggcaacactaacgccgtgcgcgggctggcaaatatttaccgccagcaatcgccagaaaaagctgaagcgtttatcgcctcgctctctgccagtcagcggcgtagcattgatgatatcgaacgcagcctgcaaaacgaccgtctggcacagcaggcagaggcactggaaaaccagggcaaatgggcgcaggcggcagcacttcagcggcaacgactggcgctggaccccggcagcgtatggattacttaccgactttcgcaggatctctggcaggccggacaacgcagccaggccgatacgttaatgcgcaatctggcgcagcagaagtcgaacgacccagagcaggtttacgcttacgggctgtacctacgcttacgggctgtacctctctggtcatgaccaggacagagcggcgctggcgcatatcaacagcctgccgcgtgcgcagtggaacagcaatattcaggagctggttaatcgactgcaaagcgatcaggtgctggaaaccgctaaccgcctgcgagaaagcggcaaagaggcagaagcggaagcgatgctgcgccagcaaccaccttccacgcgtattgacctcacgctggctgactgggcgcaacaacgacgtgattacaccgccgcccgcgctgcatatcagaatgtcctgacgcgggagccagctaacgccgacgccattcttggtctgacggaagtggatattgctgccggtgacaaagcggcggcacgtagccagctggcgaaactgcccgctaccgataacgcctcgctgaacacacagcggcgcgtggcgctggcacaggcgcagcttggcgataccgcagcagcgcagcggacgtttaataagttgatcccgcaggcaaaatctcagccaccgtcgatggaaagcgcgatggtgctgcgtgatggtgcgaagtttgaagcgcaggcgggcgatccaacgcaggcgctggaaacctacaaagacgccatggtcgcatccggtgtgactacgacgcgtccgcaggataacgacacctttacccgactgacccgtaacgacgagaaagatgactggctgaaacgtggcgtgcgcagcgatgcggcggacctctatcgccagcaggatcttaacgtcacccttgagcacgattactggggttcgagcggcaccggtggttactccgatctgaaagcgcacactaccatgttgcaggtggatgcgccgtattctgacgggcggatgttctttcgcagtgatttcgtcaatatgaacgtcggcagtttctccactaatgccgatggcaaatgggatgacaactggggcacctgtacattacaggactgtagcggcaaccgcagccagtcggattccggtgccagcgtggcggtcggctggcgaaatgacgtctggagctgggatatcggtaccacgccgatgggcttcaacgtggtggatgtggtcggcggcatcagttacagcgatgatatcgggccgctgggttacaccgttaacgcccaccgtcggcccatctccagttctttgctggcctttggtgggcaaaaagactccccgagcaataccgggaaaaaatggggtggcgtacgtgccgacggtgtggggctaagtctgagctacgataaaggtgaagcaaacggcgtctgggcatcgcttagtggcgaccagttaaccggtaaaaatgtcgaagataactggcgcgtgcgctggatgacgggctattactataaggtcattaaccagaacaatcgccgcgtcacaatcggcctgaacaacatgatctggcattacgacaaagatctgagtggctactcactcggtcagggcggttactacagtccgcaggaatacctgtcgtttgccataccggtgatgtggcgggagcgcacggaaaactggtcgtgggagctgggggcgtctggctcgtggtcgcattcacgcaccaaaaccatgccgcgttatccgctgatgaatctgatcccgaccgactggcaggaagaagctgcgcggcaatccaacgatggcggcagcagtcagggcttcggctacacggcgcgggcattacttgaacgacgtgttacttccaactggtttgttggcacggcaattgatatccagcaggcgaaagattacgcacccagccatttcctgctctacgtacgttattccgccgccggatggcagggtgacatggatttaccgccgcagccgctgataccttacgccgactggtaagttttcagatagcgcctctcttaatgccgctgcgatcgggtatactcgggcggcaatctgggatttccggggggagacaatttgcgcgtaagtcgctcgttaacaatcaagcagatggcaatggtggcagccgttgtcctggtgttcgtttttattttttgcaccgttttgctgttccatctggtccagcagaatcgctataacacggctacgcaactggaaagcattgctcgctctgtccgcgaacccttatcttcagctattttgaaaggcgatattcccgaagcggaagctattcttgccagcattaaaccggcaggcgtggtcagccgtgccgatgtagtgctgcctaaccagttccaggcgctgcgtaaaagttttattccagagcgcccggtgccgataatggttactcgcctgtttgagctaccggttcaaatctcgctgggcgtttactcgctcgaacgtccggcaaacccgcagccaattgcctatctggtactacaggcggattccttccgtatgtataagttcgtgatgagcaccctctcaacgttagtgaccatttacttacttttgtcgcttatcctgaccgtcgccatcagctggtgcattaaccgcctgattttgcatccgttacgcaatattgctcgcgaacttaacgccatcccagcccaggagcttgttggtcaccaactggcattaccgcgtctgcatcaggacgatgaaatcggtatgttggtgcgcagttacaacctcaaccagcaattgctgcagcgccattatgaagaacagaacgaaaatgcgatgcgcttcccggtgtcggatttgccgaacaaagccttgctgatggagatgctggagcaggttgtcgcgcgtaaacaaaccaccgcgctgatgatcatcacctgtgaaaccctgcgtgatactgcgggcgtgctgaaagaggcgcaacgagaaattctgctgctgacgctggtggaaaaactcaaatcggtactgtcgccacgtatgatcctcgcgcagattagcggttatgactttgctgtcattgccaacggtgtacaggaaccgtggcacgcaatcaccttaggtcagcaagtgctcactatcatgagcgagcgcctgccgattgaacgtattcaactccgtccgcactgtagcattggcgtggcgatgttctacggcgatctcaccgccgaacagctttacagtcgcgctatttctgcggcatttaccgctcgccataaaggcaagaatcagattcagttctttgatccgcagcagatggaagccgcccagaagcggttgacggaagagagcgatatccttaatgcactggaaaatcatcagtttgctatttggttacagccacaggtcgagatgaccagcggtaaactggtcagtgcggaagtgttactgcgtatccagcaaccggatggcagttgggacctgccggatggcttaatcgatcgcattgagtgctgtgggctgatggttaccgtcggtcactgggtgctggaagagtcctgtcgattgcttgcagcctggcaagagcgcggcattatgctgcccttgtcggtaaacctctctgcgctgcaactgatgcacccaaatatggtggcggatatgctggaactgttaacccgctatcgcattcagccgggaacactgattctggaagtgacagaaagccgacgtattgacgaccctcatgctgcggtggcaatcctccgtccgctgcgcaatgccggagttcgggtggcgctggatgatttcggcatgggctacgcagggctgcgtcagctgcagcatatgaaatcgttgccaatcgacgtactgaaaatcgacaaaatgtttgttgaaggcttgccggaagatagcagcatgattgctgcaattatcatgctggcgcagagcctgaacttacaaatgattgccgaaggcgtggagactgaagcacaacgcgactggctggcaaaagcgggcgttggtattgcccagggcttcctttttgctcacccactccctattgaaatcttcgaagagagttacctggaagaaaagtagctaccccaaactgattacaaaactttaaaaagtgctggtttgtgcgagccagctcaaactttttaacctttttgtttcaattatgatccaggtacatttctgtgatgttgtctgggtgttattttaaggccgcaggtaccccataaccttacaagacctgtggttttactaaaggacaccctatgaaaacctctctgtttaaaagcctttactttcaggtcctgacagcgatagccattggtattctccttggccatttctatcctgaaataggcgagcaaatgaaaccgcttggcgacggcttcgttaagctcattaagatgatcatcgctcctgtcatcttttgtaccgtcgtaacgggcattgcgggcatggaaagcatgaaggcggtcggtcgtaccggcgcagtcgcactgctttactttgaaattgtcagtaccatcgcgctgattattggtcttatcatcgttaacgtcgtgcagcctggtgccggaatgaacgtcgatccggcaacgcttgatgcgaaagcggtagcggtttacgccgatcaggcgaaagaccagggcattgtcgccttcattatggatgtcatcccggcgagcgtcattggcgcatttgccagcggtaacattctgcaggtgctgctgtttgccgtactgtttggttttgcgctccaccgtctgggcagcaaaggccaactgatttttaacgtcatcgaaagtttctcgcaggtcatcttcggcatcatcaatatgatcatgcgtctggcacctattggtgcgttcggggcaatggcgtttaccatcggtaaatacggcgtcggcacactggtgcaactggggcagctgattatctgtttctatattacctgtatcctgtttgtggtgctagtattgggttcaatcgctaaagcgactggtttcagtatcttcaaatttatccgctacatccgtgaagaactgctgattgtactggggacttcatcttccgagtcggcgctgccgcgtatgctcgacaagatggagaaactcggctgccgcaaatcggtggtggggctggtcatcccgacaggctactcgtttaaccttgatggcacatcgatatacctgacaatggcggcggtgtttatcgcccaggccactaacagtcagatggatatcgtccaccaaatcacgctgttaatcgtgttgctgctttcttctaaaggggcggcaggggtaacgggtagtggctttatcgtgctggcggcgacgctctctgcggtgggccatttgccggtagcgggtctggcgctgatcctcggtatcgaccgctttatgtcagaagctcgtgcgctgactaacctggtcggtaacggcgtagcgaccattgtcgttgctaagtgggtgaaagaactggaccacaaaaaactggacgatgtgctgaataatcgtgcgccggatggcaaaacgcacgaattatcctcttaatctcaccacttatgcccgcactcccttccccgagtgcgggtgtttgcgcataattgacccctgtgcctgaacttaccacctgggtgagttcaggtttatttcacttcttccgtgacattttcatgttcttgcggtctaacacgaagtgtttttaacgtcatttagactgactgacaacgggcagttttttattaccaggatagttgatcaggggttcacatgcagggcacaaaaattcgacttttagcgggcggtttgctgatgatggccactgctggctatgtgcaggcagatgcgctccagcctgatccagcatggcaacaggggacgctttccaacggtttacagtggcaagtgctgaccaccccccagcgtcccagcgatcgtgttgaaattcgcctgctggttaatatcggttcgctcgccgaaagtacacaacagagcggttacagtcacgccatccctcgtattgcgctaacgcaaagcggtggccttgacgcagcacaggcgcgttcattgtggcagcaggggatcgaccctaaacgcccgatgccgccggtaattgtctcttatgacaccacgctgtttaatctgagtttgcccaataaccgtaacgatttgctgaaagaagcgctctcttatctggcaaatgccactggcaaattgaccatcacaccagaaaccatcaaccacgcgctgcaaagtcaggacatggtggcaacctggcctgccgatactaaagagggctggtggcgctatcgtctgaaagggtcaaccttgttaggtcacgatcctgccgatccgctgaaacaacccgttgaagcggaaaaaattaaagatttctatcagaaatggtacaccccggatgcaatgacgctactggtggtgggaaacgtggatgcgcgctcggttgtcgaccaaatcaacaaaacgtttggcgaactgaaaggcaaacgtgaaacgccagctccggtgccgacgctttctccgctgcgtgcggaagcggtgagtattatgactgacgcggtgcgtcaggaccggttatctatcatgtgggatacgccgtggcagccgattcgtgaatcagccgcactgctgcgctactggcgtgcggacctggcccgcgaggcgctgttctggcatgttcagcaagcgttaagcgccagtaacagcaaagacatcggtcttggatttgactgccgtgtgctgtatctgcgtgcgcagtgtgccatcaacatcgaatcaccaaacgacaagctgaacagcaaccttaatctggtggcgcgtgaactggcgaaggttcgcgataaaggtctgccggaagaagagttcaatgcgttagtggcgcaaaagaaactggagctgcagaaactgtttgccgcctatgcgcgggctgataccgatattctgatgggtcagcggatgcgttcgctgcaaaatcaggtcgtcgatatcgcgccggagcagtatcagaaactgcggcaggatttccttaacagcctgacggtggagatgttaaatcaggatctgcgtcagcagttgtcgaatgatatggcgttaatactgctgcagccgaaaggcgagccggaatttaacatgaaagcgttgcaggcggcctgggatcaaatcatggccccatcgactgctgctgccgccacctctgtcgccacggatgacgtacatcctgaagtgacggatattccacctgcacagtaatgcctgatggtgatgagttagcacaaccatcaggtatttatggatgagctggatagaggggtaacactttatccagccttttgcatatgctgcgtttacgctggcatcgcctcacgcgggataatcgcgccgcgatactgaataacggtacttgcggtcaggtgcccgcgtttcgccgcgttttccgcactgccgcccgtcaaacataccgccagataaccggcgctgaaagagtcgccagctgcggtggtatcgatcactttttctttcggcagtttcaccgccggaacatccactaacccttcgccagcaatggacaccaggcaagaatccgccccgcgtttcaccaccacttctttcacgcccgcgttatgggtgcgcgcaatgacgtcttccaccggctgttgaccccacagcgcgtcttcatcgtccagcgtcaggaaggcgatatccgtgcattccagcatttgttggtacacctgctgtgtctcttctttgctggcccacaggcgcggacgatagttattgtcgaaaatcacttttccgccgttggcgcggcattcgcgcagcagggaaagcagcttttcgcggctggtcgggcttaagatcgccaggctaatcccgctcaggtagagataatcgaaattcgccagctcttcgcaaatcgccgcagactgctcactctccagccagaatttggcggcggcttcgttccgccagtagtagaacgtacgctcgccggtgctgtcggtttcaatgtagtaaaggcccggcagacggttttccatccgttgggtcagggaagtatcaacgttctcgccgtgccaggcgtccagcatttgctggctaaaactgtccgttcccagcgccgttacgtaatgaacggttaatgccgcaggatcgacctgacgggcgatatagacggaagtgttcagggtatcgccgccgaaaccgcgcttaacgtccgcgcctttctcggaaagctcaatcatgcattcgccaatcacggcaatctttttggacatagtcgtgaacctgatctgtaaaaaattagcgttagtttgcgctgtggtggtttgctggtcaaccatattaaaacagtgttccattatttttttgagccagaacgtattcctgaaagattccgttgtggagtgaggaaatttaccccggccaggcggtaaagttctgcccttgcgcgccgataatctttgtcgagtccgggcagcatcacttttaaacacaggacatctttgatgataaggcaggttatccagcgaataagcaaccctgaagcaagcatcgagagcttgcaggaacggcgtttttggttgcagtgtgagcgtgcttacacctggcagccgatctatcaaacatgcggacggttaatggccgtggagctattaacggtggtcacgcatcccttgaacccttcgcaacgcctgccgccggatcgctattttactgaaatcaccgtcagccatcggatggaggttgtgaaagagcagattgatttgctggcgcaaaaagccgacttctttgtagagcacgacctgctggcatcggtcaatattgatggccctacgctcatcgccctgcgtcagcaaccaaaaatcctgcgccaaattgagcgtcttccctggctgcgtttcgaactggtggaacacatccgcctgccgaaagattcaacctttgcctcgatgtgtgaatttggcccgctgtggctggatgattttggcaccgggatggcaaatttctctgcgctaagtgaagtgcgttatgactacatcaaaatcgcgcgagagctgttcgtgatgctgcgtcagtcgccggaaggccgcacactcttttctcagcttttacatctaatgaatcgctattgtcgcggggtgattgtcgagggcgtagaaacaccggaagagtggcgtgatgttcagaactcgcccgcattcgccgcacaaggctggtttctttcacgcccggcaccgatggaaacgctgaatacggcggttctggcgctataagctgcctcattttccgctgggctggactatctttaggactggcacaggaagaatatgaggaagcgaacgatgagcaaggcaggcaaaataaccgctgcgatttcaggggctttcttgttgttgattgtcgtggcgatcattttgattgcaacttttgactggaatcgactcaaaccgaccatcaaccagaaagtctctgcggagttgaatcgtccgttcgctatccgtggcgatctgggcgtggtgtgggagcggcaaaaacaagaaactggctggcgcagctgggtgccgtggcctcatgtacatgcagaagacatcattcttggtaatccaccggatattcccgaagtcacgatggtgcatttgccgcgagtagaggcaacgctggcaccgctggcgctgctgaccaaaacggtctggctgccgtggatcaagctcgaaaagcccgacgcgcgcctgattcgcctctccgaaaagaacaataactggacgtttaatcttgccaacgatgacaacaaagacgcgaatgcaaagccgtcggcatggtcgtttcggctggataatattcttttcgatcaagggcggatcgccattgatgacaaagtaagcaaagcggatctggaaatttttgttgatccgttaggcaagccgctgccgttcagcgaagttactggatcgaaaggtaaagcggataaagaaaaggtgggcgattacgtttttggcctgaaggcgcagggacgttataacggtgaaccgctcacgggtacgggaaaaataggcggtatgctggcgctgcgtggcgaagggacgccgtttccggtacaggctgatttccgttcaggtaatacccgtgttgcttttgatggcgtcgtgaatgacccaatgaagatgggcggtgtcgatttacggcttaaattttctggcgattcactgggtgatatctatgaactgacgggcgttctgctgcccgataccccgccgtttgaaacggatggtcggctggtagcgaaaatcgacactgaaaaatcgtcggtctttgattatcgcggttttaatgggcgaattggcgatagcgatatccacggttctctggtctacaccaccggaaagccacgaccaaaactggaaggtgatgtcgagtcgcggcaattgcggctggcggacctgggaccgttgattggcgttgattccgggaaaggggcagaaaagtcgaaacggtctgaacagaagaagggcgaaaaaagcgttcagcctgcgggcaaagtgctgccttatgaccgcttcgaaaccgataaatgggacgttatggatgccgatgttcgcttcaaagggcggcgcattgagcatggcagtagcctgccgattagcgatctttctactcatatcatcctcaaaaatgctgacctgcgcctgcaaccgctgaaatttggcatggcgggcggcagcattgcggcgaatattcatctggaaggcgataaaaagccgatgcaggggcgggcagatattcaggctcgtcgactgaaactgaaagaactgatgcccgatgtggaactgatgcagaagacgctgggggaaatgaacggtgacgcggaactacgcggtagcggtaactcggtggcggcgcttttaggcaacagtaacggcaacctgaaactgttgatgaatgacgggctggtgagccgcaacctgatggagattgttgggctgaatgtcggcaactacattgtcggtgcgatatttggtgacgatgaggtgcgggtgaactgcgcggcggcgaatctgaatattgccaacggcgtggcgcgcccgcagatttttgctttcgatactgagaacgcgttgattaatgttaccggcacggcaagttttgcttcagaacagctggatttgactattgatccggagagtaaagggattcggattatcacactgcgttcgccgctgtatgtgcgtgggacgtttaaaaatccgcaggctggggtgaaagccggaccgctgattgcccgtggtgctgttgctgcggcactggcaacgctggtaacaccgacggcggcgttactggcactgatctcaccttccgaaggggaggctaatcagtgtcggacgatattgtcgcagatgaagaagtgatgataattgccggatgtctgacatccggcaattaaacagatttagatttttggcaaagtgtgctttgttcatgccggatgcggcgtgaacgccttatccggcctacaaatccttgtgaattcaatatattgtatggaaattcagtcctgataagcgtagcgcatcaggcttttcacacttattacaacgactgatgtcgcgtctcatgggtcagcagcagggcgattaacgtcaagccagccatcgccgccagatataaccccaccgcacctaacccgtagttagtctgcaaccaggctgcgatatacggtgcaacggaagccccgagaatcgacgctacgttgtaagagaatgatgctccggtgtaacgcacttctgttgggaacagctctggtaacagcgcgcccatcggcccgaaggtcagccccatcagacttaaccccagcagcaggaaggcaaaaaccagaatcgggttgccagaaccgagcagcgggttaaaggcgaacagcgcgaacaggatgatcagcgtggtgataattaccatgcttttacggcgaccaaaggcatcagccagtaatccggcgactggcaccatcacgccaaaaccaataactgccatcatcagcatccacaacacttcgttacgcggcaggccaagcccaactggcgcggcggcggtactgaaggtcatagagtagaccgtcatgatgtaaaacagcgtataggttgccagcatgatgaacgtacccagtacggttacgcgaacatgtttggtcagcagcgtacccagcgggatcttcacctgttttttcgctttagcgactttctcaaacaccggcgactcatgcagcgacacgcgaacatacaggccgataatgaccagtaccgccgagaagataaatggcacacgccagccccagctcataaactgctcgtcggtcagtagccaggaaagcagcaagaaagtgccgttggcaaagaagaagccaatcggtgcgcccagctgtgggaaggagccatacagtgcacgtttgcgcggtggggcgttttcagtcgccagcagcgccgcgccgccccattcaccgcctaagcccagaccctgaccaaatcgagccagcgccagcagcagcggggcgaaaataccaatcgtggcatagcccggcagcagaccaatcaccacggttgaaatccccatcgttagcaacgaggcgaccagcgtcgctttacgcccaacgcgatcgccaaaatgaccaaaaacggcagagccaatggggcgcgcgacgaaggcgatggcgaaggtggcgagcgactgtagcgttgctgccgttggatcgccctgcgggaagaagatatgcggaaacacaataacggccgcagtggcgtaaatgtaaaagtcgaagaactcaatggccgtgccaatgagagaggcgacaaggactttattacgcgagttgatcggcgtgtattcttgctcgtggtcgagtgttgtggctgttgcttgcataatcttttcttattttttggctaacgaatagccatattacgcacagcaaaagtgatatttcaatgtgtaacaaatcgcggaaatggtcaaaaaccaggcaaaaaggggataatgtttaggccagtgatttttcttctatgaaatgcttcacataattttataaatagtggataaaactggttttaggttaaataaaagttaccaactggatttatatgctggggttatgagttggaatgaaattgtttgctcccaaatagatggctgaagaggctctggggaagagtttcaagaggttatgtgcgcattatagccggatgcgatgctggcgcatcttatccggcctacggggagccaggccgaataaaatcgtatgccggataaggcgtttacgccgcatccggcctattttaaggctgcgttttccctggcattcgcgggtcgtctttatattcggcggtggcaatccacgccgcgcaaaacagcgtcaaacgggcgaagaagtagaaaaatgccatcagccccagcacggaaccaaatgctgcgccagagggggatttcatcagcgatggcagggtgtaggtcatcacgattttaatcacttcaaaaccaatagcagccagaaatgttccgcgaatcagggcttttttgcgcggacggtggcgcggtaaccgccagaagatccagaagaaaagcagatagttggcgaagatggaaatcgccaggccaatcaaccgccacgtcggtttcagccactcaatgctgttcaggtgcagggcgctaataatcatttgctgcgccgaaccggcaaccgaggtgatcgaaagcgtcacaatcagcgcaatcaacaaaccaatcagcgaaataaaatcacgtagatattttacccagaacttctcctgatcttgcggcgagcgttcccagacatcgcgcgactgggcgcgaatcgcttcacgcaggttacccatccagttgatgccggaataaagcgccacagccaggccgacaagccctacagtcgtacgctgctgaacggcggtgttgatggtgtttttcaacgtggcggctagcgtcggatcgctgatgttttgcagaattttgtcgaagatatcctgtagcaacatcggatgggaggccagcacaaagccccctgcggcaaacgacaccatcaaaatcgggatcatcgacaaaaatgagaaataggtgatagccgcaccaaactggttacccagccgatcgttaaagcgttctgtcgcgcgaatcaggtgcgcaataaccggttggcgttggactttttcggcagtggtggtgacggtttccagcgcctggctaactttgccgcctttctcgctattatccaactgcttaatcggctcgtgctccagatcctgggtgggacgtttgatctcgttttcctgcgtcatccgctcttttgtccttctgttgtggtcattcttaaaaagtatagtcggtcagtccaggtactctttcattacgccagccagccactgcataaacaggtttacacgccgggaaagctcccgacgctgcggataaaccagcgaaagggagagcggctcggcacggtagcctggcaacacttcaataagctgcccggcacgcagggcttcgcgcacggcaatgcgcgggatctgaataatccccagaccggcaagaccggcggcgagatagttttcgctactgtttaccgtcaacatgccgccagacttaaaccactggacgccattaacgctggcaacctcaaaacctaacggatgtacacccaggtgcggtgtataacgcaccattgcgtgtgaagtcagatcatcggggctttgcggataaccaaagcgcgtcagatagtgcggactggcacagttgaccatggtcagtttgccgaggggacgggcgataacgccatcttccggtaacgcgccagtgcgtatcacgcaatcaaaaccatcatgaagaatatctaccggacggttatggctactcagttccagctcaattcccggatgctgatagagaaattccgacagacgcggcagtaacaggtttttcgcgattcctgacgggatgtcgatgcgtaatttaccgctgatactggtggcatcctgttgaaacagaccgtccagttcgctgagattactcaacacatcttttgcccgttgataataggtcatgccttctggcgtgagtttgacccgtcgcgtagtgcgctggagaagctgggtgccaagttgatgttccagtgcctgtatctggcgcgaaacacttccctttggcaaagcaaagaaatccgccgcgcgggaaaaactttccagctccgcgactttgatgaacaactgcattgcgtgaattttatccatttctttgaccgattgttgttcacagcgaaacagtaacgcgcatatcgcattgtttattgttttttctaacatctaatgccgggtttcacaatgttgtcatgacgaatgtggcgatttctcagcaggaaaagggcggaatagctttatgagaaaggtgaatccccttaaacagagcgtatttttcagtgattccctttaaagtgaatagaggacgtattggctatttgtgcttatttttgtctcattgccatttgttattttggcttgtagtcgcggaatttcatttttaattgcatgcgtactaaccaccaatataaggaaatcctcaaaattgttttaaatagtgccctcgacatgtaatttcaggcgtttagctgtaactatttatatcggtaactattttctacgcgtcatctctgtagaatggccaccgccaaatggcgaattcttattttttctcgcgggtaatacccttccactacttaagtctttttaacgtattcaggtggagattcagttatgcaaatagtcatgtttgacaggcagtcaatatttattcatggaatgaaaatcagtttacagcagcgtattccaggagtgagtattcagggggccagtcaggcagacgagttatggcaaaagctggaaagttaccctgaagccttagttatgctcgatggcgatcaggatggtgagttttgctactggttgctgcaaaaaaccgtggtgcagtttcctgaggttaaggtgttaatcacggcgacggattgcaataaacggtggttacaggaagttattcattttaatgtgctggccattgtgcctcgtgattcaaccgtcgagacatttgcgttggcggtaaatagtgcggcgatggggatgatgtttctgcctggagactggcggacgacgccggaaaaggacattaaagatctcaaatcgttaagcgcccgccagcgggagattttaaccatgttagcggcgggcgaatcaaataaggagatcggcagagcgctgaatatcagtaccggaacggtaaaagcgcatctggaatccctgtatcgccgtctggaagtgaaaaatcgcacccaggcggcaatgatgttaaatatctcctcctgaagtaatgccagtcagttaagcaactgactggctctttttcggggctgtggggtatttccagggcctctcctttaccactctcgggaaggccctttcccttctcgtcggtaatttcacaagttgtcccatacttgcaagatcgcgcatcagctccggtatacgtcccggtgaagcgccctgcaatgtcatcagcattctcatcaccattccgcatgattctgagaaactcagttgattcggccagtaacctttcagatgttccgccattttaatcatctgatatctcaccagattataagccagtaagacaccccacagctcttgctccacaagctccggctttttacttctcagcgtcagcctgctcagttgcatcgtctgttttatctccctgtatcccagttcgatttcccagcgatgactgtacagatccgccatttctcctccggggaagcgcatggcgtccgtcatcgacgtcagcagatggcagacttttcctttgcgcgtcacggtcagcaggcgggctgtcacttcatttcccagtcccggccacttttttcgtgcctgcgggctggttttcagcttcaccagatgatcgcctttacccagttttctgagctcttcatattgcgctccctttctgagaggtatcatccagtggcggtgttctcccgccaggctccaggcatttaacagtcccagtgagtaataacctttatccattaacgtcagagtgttatcgccggtttgttctataagttgctcagcaagctcattttcgctgttcttcatcgtgccgaaggctgcagccgtcagcagatggctggtcagttccatctggcagaccattttgacctgcgggtagagcgccgggttcccggcatgtgtctggcgggggaaggctgcatcgttctctggtgtatccggtgtgcgccagaacacaccatcgatggccagcagggtcaggccgcaccagtgcggatgcggcgtggcgttatgccagagctgcgctgttttcgtgaacacgcggcggacagcctcacttcccaggcgctggcgggcctgaataacggcactgggggcaacgaaggggcgattgcccggcagcatgatgtccaggcgattcacaatctggtgaagaggttctttacgctcaagcgccatgccaacaatacaccagaccatcatttcgaggggaagacggcgcttgcgtagcgttacagtacctgattcggcaaggcaacgagagatgagttcggggtcgaggtaatcccccagagaagtcagtgggttacgcagagaatcgtaacgggataccagatcaagagcctgtccaatgtgcataaaaaaatccggaaacaagtgagcgtttccggattcttacacagccactggatcggtcaactgatccttaactgatcggcattacaccggtcggcagcccttttttatctatgatagtgattactcaaccgtaaccgattttgccaggttacgcggctggtcaacgtcggtgcctttgatcagcgcgacatggtaagccagcagctgcagcggaacggtgtagaagatcggtgcaatcacctcttccacatgcggcatctcgatgatgtgcatgttatcgctacttacaaaacccgcatcctgatcggcgaagacatacaattggccgccacgcgcgcgaacttcttcaatgttggatttcagtttttccagcaattcgttgttcggtgcaacgacgataaccggcatatcggcatcaataagcgccagcggaccgtgtttcagttcaccagcagcgtaggcttcagcgtgaatgtaggagatctctttcagcttcaatgcgccttccagtgcgattgggtactgatcgccacggcccaggaacagtgcgtgatgtttgtcagagaaatcttctgccagagcttcaatgcgtttgtcctgagatagcatctgctcaatacggctcggcagcgcctgcagaccatgcacaatgtcatgttcaatggaggcatccagacctttcaggcgagacagcttcgccaccagcatcaacagcacagttaactgagtggtgaatgctttagtggacgccacgccgatttccgtacccgcgttggtcatcagcgccagatcggattcgcgcaccagagaagaacccggaacgttacagattgccagcgaaccaaggtaacccagctctttcgacagacgcaggcccgccagggtatccgcggtttcgccagactgtgacaaggtgatcatcaggctgttacgacgcacggcagatttacgatagcggaattcagaggcgatttcgacgtcgcacggaatacctgccagcgattcaaaccagtagcgggaaaccataccggagttataagaagtaccacaggcgaggatctgaatatgctcaaccttcgacagcagttcgtcggcgttcggtcccagctcgcttaaatcaacctgaccgtggctgatgcgcccggtaagggtgttttttatcgcgttcggctgttcgtagatctctttctgcatgtagtgacggtaaatacctttatcgcccgcgtcatattgcagattggattcgatatcctgacgttttacttccgcgccagttttatcgaagatgtttaccgaacggcgagtgatttccgcaatatcgccctcttcaaggaagataaagcgacgggtcaccggcaacagcgccagctggtcagaagcgataaagttttcgcccatacccaagccaatcaccagcggactaccagaacgtgccgccagcagggtatccgggtgacgggagtccatgatcactgtaccgtacgcaccgcgcagctgcgggatagcacgcagaacagcctcacgcagagtcccgccttgtttcagctcccagttcaccagatgggcaatcacttcggtgtcggtttcagaaacgaaggtatagccacgcgcttttaactcttcacgcagcggttcatggttttcgatgatgccgttatgcaccaccacaatgtgttcagaaacatgcggatgcgcgttagcttctgaaggttcaccgtgggtcgcccagcgagtgtgagcaataccggtgccgccatccagaggatgttcttccgctgcctgagccagcatctggactttaccgaggcgacgcaggcgggtcatatgaccttccgcatcaacaacggccagaccggcagagtcatatccgcggtattccagacgacgtaaaccttcaagaaggatttctgctacatcacgttgcgcgatcgcgccaacaattccacacatagtttttgattccgatttatatcgttgtcggtcaacctgtatgcccgttttttcgggcgccccgagccttgtagagagtggggttatttttatagttactgcttgtgggagggagattatgttatctcctcatcccagatgaccggattacccggccagaattactttttctttaccggacgacgccagccttctttctgagtctgcggcacacggctgatagctaatgcattttcgccgacattacgcgtcacagttgtacccgcagcaatggtcgcgcctttgcctactgttaccggggccaccagctgagtgtcggaaccgacaaacacatcgtcgccgataatggtcttaaatttattcgcaccatcgtagttgcaggtaatggttcccgcgccgatgttaacgttatcgccaatttccgcatcgcccaggtaagtcagatgcccgactttcgagcctttacccagacgcgcttttttcatctcaacgaagttaccaacgtgtgcaccttccagcaactcagcaccaggacgcaaacgagcaaacgggccaatagtacaggccgctgccagattcgcgtcttccacaacggtatacggactgatttcgcaatcatcgccaatcacgctgtttttaatcacgcaaccggtgccgattttcacgcgatgaccgagagtcacgttgccctcgatgataacgttagtatcaatttcaacatcgcgcccgtgagtaagcgtaccgcgcagatcaaaacgcgccggatcgcgcagcataacgcctgctaacagcagtttttcagcctgttcggactggtaaacgcgctccagacgggagagttgcaggcggttattcacaccttctacttcgcttaaacgttgcggatgaacggcgacgatttcacgcccttcctgatacgccagcgcaataatgtcggtgatgtagtattcgccctgagcattattgttggtcagcttcgccagccagcgtttcatatctgcgccgttagcgatcagaatgccggtgttgatctcctgaatctgacgctgctcgtcggtggcatctttgtgctcaacaatgccggtaactttgccattttcacgggtgatacgtccataaccggtcggatcatccagtttcaccgtcagcagaccaatgccaccctgcggtttagcatcacgcaggcgctggagtgtttcgacagagatcagcggcacgtcgccgtagagcattaaaatgtcttcatcatcggcaaagaaaggtgcggcctgctgcattgcatgacccgtacccagctgctctgcctgaagcacccagttaaggttgtcgtctttcagcgcctgtttaagcagatcgccgccgtgaccgtacaccaagtgaacgtgcgctgcgcctaattcattcgcagcatcaatgacatgctgaaccatcgctttcccggcaagggtatgcagcactttcggaagatcggaatacatgcgcgtgcctttgcctgcggcaaggatcactacgctcatagcattattcaacatacgcgtcctgactgtaatttgagaacgaatttaaaccgcttcaccttgaaaaaactacatttttttcatcgtgaaatggacagaggataaattgttcaataacggattatccccgctgacgaaagtgccattttcgaccatcgtcacgccttttgtctgcagaaaattaaggcagtaccttcatttaagcgtcaggtggatgtttttgctcttatttcgatcaatgaataaacgggaaaacaggggtgttttatatcagcaggatctatgtgaacgctcttcaggacggatcacgcgtaaaaaaaagccagcctgtttccagactggcttttgtgcttttcaagccggtgttacatcgcttttttggtcaactcgataacgcgcagctgcgcgatcgctttggccagttccgcagacgcctgagcgtaatctacgtcgccgtgagagctgctaatgtgctcttcagccttacgtttcgcttccatggctcgcgcttcgtcgagatcctggccgcgaattgcggtgtcggccagaacggtcacgttgccaggctgcacttcaagaatgccgccagacagatagataaactcttcgtgaccgtgctgtttcacgatgcgaatcataccaggcttaatggcggtgagcagcggtgcgtggccagggtagatccccagttcaccttcgctacccgttacctggattttctcgaccagaccagagaacatttgttgctctgcgctgacgacgtccaggtggtaagtcattgccatatcaccctccgattaaggcgttaaagttttttggctttttccacagcttcttcgatggaaccgaccatgtagaacgcctgctccggcaggtgatcgtattcgccttccatgatgcctttaaagccacggatggtgtctttcagggagacgtatttacccggagaaccggtgaatacttctgccacgaagaacggctgggacaggaagcgctggatcttacgagcacgcgctaccaccagtttgtcttcttcagacagttcatccatacccaagatggcgatgatgtctttcagttcctgataacgttgcaggatggactgaacgccacgcgcggtgtcgtagtgttcctgaccaaccaccagcgggtccagctgacggctggtggagtccagcgggtcaacggccgggtagatacccagagacgcgatctgacggctcagtaccacggttgcgtcaaggtgcgcaaaggtggttgccggagacgggtcagtcaagtcatccgcaggtacgtataccgcctgtacggaggtgatagaaccagttttggtggaggtgatacgttcctgcagaacgcccatctcttccgccagggtcggctgataacctaccgctgaaggcatacggcccagcagtgcggatacttccgtaccggccagggtgtaacgatagatgttgtcaacgaacagcagaacgtcacgaccttcgtcacggaatttctcagccatggtcagaccggtcagagcaacgcgcagacggtttcccggcggctcgttcatctggccatacaccagggatactttgtcgataacgttggagtcggtcatttcgtggtagaagtcgttaccctcacgagtacgttcacctacgcccgcaaacacagagtaaccggagtgctcgatcgcgatgttacgaatgagctccatcatgtttacggttttacctacacccgcaccaccgaacagaccaactttaccgcccttagcgaacggacacatcaggtcgataactttgataccggtttccagcagttcctgagagtttgacagctcttcgtaggaaggtgctgcgcggtgaatcgcccaacgctcttcttcaccgatctcgcctttcatgtcgaccggttcacccagtacgttcatgatacggcccagagtcgctttacctaccgggacttcgatcgggtgttcgaggtcttttacatccagaccgcgacgcagaccgtcggaggaacccattgcgatggtacgcacgataccgccgccgagctgctgctgaacttccagcaccagacgctcattaccattttgcacctcaagagcatcgtacacgcgcggtacggcatcctgagggaattcgacgtcaactacggcgccgattacctggacaatctttccagtagccatcttaaatcctctacgaaataacctgtttaaaccgcggcggcccccgagacgatctcggtgagttcctgagtaatgctggcctgacgagctttgttgtataccaactgcagctctttaatcaggctgccgccattgtcggtcgcggctttcatcgccaccatacgggcggcctgctcgctggccaggttttcaaccacgccctgataaacctgagattcgacataacgacgcagcagggtatccagcaacgccttcggatcgggttcgtacaggtaatcccaggatttatgtttcagatcatcatcatctgatgccggtaacggcagcagctggctgatggtcggaacctgagacatggtgttaataaatttgttgctgacaatgtaaagcttgtccagacggccttcgtcgtaagcctgcaacatcacttttaccggaccgatcagttcggacagggaagggttatcccccatgccggtgacctgggcaacaacattgccgcccacggagttgaagaacgacacgcctttcgagccgatcattgcgaggtcgcattgaacgcctttgtcggtccaggtcttcatttccgccagtagttttttgaacaggttaatgttcaaaccaccgcacaaaccacggtcggtcgacaccaccaggtagcccacgcgtttaacgtcgcggtcttccaggtaagggtgcttatattccagattaccgtgtgcaaggtgaccaatcactttgcgcatggtttctgcataaggacggctggccgccatgcgatcctgcgatttacgcattttggaagcggcgaccatctccatcgctttagtgatcttttgcgtgttctggacgcttgcgatcttactacgtatctcttttgcgccggccatgagcttctcctcaatgccttgcggcctgccctaaggcaagccgccagacgttaccaggattgggttgctttgaaggaatcgaggatgcctttcagcttgccttcgatttcgtcgttgtagccaccggtctggttgatctcttgcatcaacggagcgtgatcacggtcgacgtaagccagcagagcggcttcgaagctgccaattttcgacagttcaacatccgccaggtaaccacgttctgctgcgaacagaaccagagactgctgcgcaacggacatcggcgcatactgtttctgtttcagcagttcggtcactttctgaccgtggtcaagctgcttacgtgttgcatcgtcaaggtcggatgcaaactgagagaacgctgccagttcacgatactgtgccagagcggtacggataccaccggacagttttttcatgatcttggtctgtgctgcaccaccaacacgggatacggaaatacccgggttaaccgcaggacgaataccggcgttgaacaggttggtttccaggaagatctgaccatcggtaatggagattacgttggtcggaacgaacgcagaaacgtcacccgcctgagtttcgataatcggcagtgcggtcagagaaccggttttccctttcacttcacctttggtgaaggcttcaacgtattcggcgttaacacgtgcagcacgctccagcagacgagagtggaggtagaaaacgtcgcccgggaatgcttcacgtcctggcggacgacggagcagcagggagatctgacggtaagcaacagcctgtttagacaggtcatcgtaaatgatcagcgcatcttcaccgcggtcacggaagtattcgcccattgcgcaaccggcatacggtgccaggtattgcagtgcagcggattcagacgcggttgctaccacaacgatggtgttagccagtgcgccgtgctcttccagtttacgtaccacgttagaaatggtggacgctttctggccgatagcgacatagatacatttgataccggaatcgcgctggttgatgatggcatcgatagccagtgcggttttacctgtctgacggtcaccgatgatcaattcacgctgaccacgaccgattgggatcatggagtcaacggctttataaccggtctgtaccggctgatctacggactgacgttcgataacgcccggagcgattgcttctacagcagagaagccgtcgtgatccagcggacctttaccgtcgattggtgcacccagagtgttaaccacacggcccagcaggccacggccaaccggaacttccaggatacggccagtacacttaactttcatgccttcggcaaggtcagcgtacggacccataacaaccgcacctacagagtcgcgctcaaggttcagtgcgatagcgtaacggttacccggcagggagatcatttcaccctgcatacaatcggccaggccgtgaatgcggataacaccgtcacttacagaaacaatagtaccttcgttgtgagcttcactcacaacattgaactgagcaatgcgctgcttgatcagttcgctgatttcggtggaattcagttgcatgctccagtccccttaagactgcaagacgtctgcaaggcgctcaagacgaccgcgtacgctgccatcaatgaccatatcacccgctcggatgataacgcctgccattacagacttatcgattttgcaattcagcttaactttgcgtgacagacgtttttccatcgcagcagaaattttcgcgagctgttgttcactcagtgcggcagcggaaatgacgtctacctcagcggtagcctcactcacggcacgaaggtgaataaactgctccagaacatccgggagcgcgttaagacgaccattttcagccattacccgaatcaggttctgaccgttttcgtccagttgctcaccacaaactgcgataaacgactcggcgagcgtttctggcgcaagcgcgccagagagaagctctgccatttgttcgtttttggttacctcggcggcaaacgccagcatgtcctgccagcgttctacactttggtgttcgacggcaaagtcaaaagctgctttggcgtaggggcgagctaccgtaataaattcagacatcagcccctccctccttacagttcagcgacaagtttatccacgatgtcgctgttagcagcttcatccacggaacgttcgatgatcttctcggcgccagcaacagccaggatagcaacttgcttacgcagctcttcacgggcacgtttacgctcggcttcaatttctgcctgcgcctgggccacgattttagtacgttcctgttctgcctcagctttcgcttcgtccagaatctgcgagcggcgtttgttcgcctgctcgatgattacctgggcttccgctttcgcttttttcagctggtcggtcgcgctggcctttgcaaggtcaaggtccttatgtgctcgttctgcggaagcaaggccgtcagcaatttctttttgacgtttttcgatggctgccattaatggcggccatacgtacttcatgcagaacagaacgaacaggacaaacgcgatggcctggccgaggattgttgcgttaagattcacagcacaatgcctctatttagttaacgttctgatattgctctttaaataaaagcaacgcttactacgcgacagcgaacatcacgtacagacccagacctacagcgatcatcgggatagcatccaccagacccataacgataaagaactgagtacgcagcagaggaatcagatcaggttgacgcgctgcgccttccaggaatttacccccgaggatgccgataccgatcgcagcaccgattgccgccagacccatcatcacagcggcagccatgtacagcagatccatattcaggttttccatgacagtctccagtttgtttcagttaaaacgtagtagtgttggtaaattaatgttcttcagacgccatcgacagatagacgatcgtcagaaccatgaagatgaaggcttgcagcgtaatgatcaggatgtggaaaatggcccacggcacattcaggatccactgtgaccaccacggcaacagaccagcaatcagaatgaaaatcagctcaccggcatacatgttaccgaacagtcgcaaaccgagtgaaactggtttggacagcaggcttaccccttcaaggattaagttgacaggaatgaacgcccagtgattgaacggctgcagcgtcaactctttcgtgaagccgccgatgcctttcattttgatgctgtagaacagaatcaggataaatacgcccagtgccatagacagcgttacgttcacgtccgcagacggaaccacacgcagtgcaggcagacccagtacatgttcagcaatgtacggcagcaggtcgataggcagtaaatccatcaggttcatcaggaatacccagacgaagatcgtcagggccagcggagcaatcagcttgcttttgccatggtacatgtctttcacgctaccattaacaaagccgatcaccagctcaatcgcggtctgaaacttacctggcacaccgctggtcgcctttttggctacgctacggaataaaaccaggaacaacagacccagcaccaccgagaagaacatggagtcaatattgattgtccagaaggtggctggggggttttgtggatccaccagcgagaatgtacgcaggtccagctgaaggttattcaggtggtgtcctatgtaatcctgcggcgtcatattttctgaagccatgatgccttttaccctttgttgttaattacagccggtgccagtatctgaaccaccagcaccaaaacccacgtaacgatcagcggcaagaataccgcctttaaaaccgccaacgccaccaccagtaacaccaacatcgccagaactttgaaagcttcgccaaatgcgaatgtccaggccacccggcctttcgctggtgtatacgcctggtgacgccaggcaaatatcataaacaaaacgttaggcagaaagactgccaggcccccgcttattgcagagacgccccagaaggggtctttgaggctgaacagcaatccacttgctatcaccaccagtaactgaacgagcagaagcttccgagcaacgtttcgactcacgagcgacacagacatcacgtttttcactcctgctcccttcgaggtatgccgcgtgtcgtataaaactttctttaaggcttagagtcaagcatcaaaaagcggtcaaattatacggtgcgcccccgtgatttcaaacaataagtagccaaaaggtgaataaatgtttaaatatttttccagtgcatacaattgcgacttttccgctaaccctgttcgatcatgaaaaactgtaaataacgcgtaaacactagtgataaagcgtgcttcagatcacatattgcgcatgttcgcgcacagtatatttatttacttggcaaatgatgcctttgcaagtttatgatatttcagtctaaaaacagatactgttttaataaatgacatttacacaacaaaaaccacccattgacatttttaataatgttttaacagccaatgatggttcttagcgccgatttttagcagactgatattttcactaatgacttattttctgcttaccaaaaaaagccacgttatcttgttgatacaaaagagtgaacgtggcgttaaatgtaaccagttatatcagtagaaaacttggttgttgttaacagtctaaccggtcaattttttatgatttttttgataaaaattaaattttatttgctttaatcaccaccagatgacgttcgccatccagagctggaacctgaagtttaaccactgattcgacctgatattcttcgggcaacaaagcgatttcatcttccggcatttgccctttcagcgcgtagaaacggccttgctcaccaggaagatggtggcaccagctcaccatatcgttcagagaggcaaaagcgcggctaattacgccatcaaatggcggctctgaaggaaactcttctaccctgctctgtactggctcaatattctccagtttaagctcatgttgcacctgacgaaggaaacgcacgcgtttaccaaggctatccaacagagtgaaatgggcttcaggacgcacgatagagagtggaatgcctggcagtcctggtccggtgccgacatcgataaaccgttcaccttgcagatacggtgccaccacaatgctatcgagaatatggcgtaccagcatctcattaggatcgcggaccgaagtcaggttgtacgctttgttccatttatgcagcatattcacgtaggcaataagctggtttttctggtgatcggtaagcgaaatacctgcgtctttcagcagtaaggagagtttgttgagcacggtgattacctgttcttgatgcgttgcctggtaagcgggtgcttaccaggcatttttaatgcgttatgcgctacgacgcagcataccctgttttttcagccacaccagcagaatggagatagccgcaggcgtgacgccagaaatacgcgaagcctggccgatagaggccggtttgtgatcgttaagtttggcgatcacttcgttagaaagaccggatacctggcggtaatccagtgtcgcgggtagcagggtgttctcgttacgcagctgcttttcgatctcatcttgctggcgcgcgatataaccttcgtatttaacctgaatctcaacctgttccgccgcctgttcgtctgtcaacgcaggggcaaacggcgtcagcgtggttaatttttcataagtcatttccggacgacgcagcagatcttcaccactggcttcacgggaaagcggcgcagtcaggtgagcattcacttcggctgcagcttccgccgacggggttacccaggtcgatttcagacgctgacgctcacgctcgatattctcaagtttctcgttaaagcgcgcccaacgttcgtcatccaccaggcccagttcacgaccgatttcagtcaaacgcagatccgcattatcttcgcgcagcatcagacgatattctgcgcgcgaagtaaacatacgatacggttctttggttcctaaagtgcacaggtcatcaaccagtacgccgagatacgcctgagaacgcgccggagcccaaccttctttgtcagcagacagacgggcagcgttaagaccgaccagcaaaccttgcgcagcggcttcttcgtaaccggtagtgccgttaatctgaccagcaaagaacagcccctggataaacttgctctccagcgtcggtttcaggtcgcgtggatcgaagaagtcatactcaatggcataacccggacgcacgatcttcgcgttttccatcccctgcatggagcggacgatttgcatctgcacatcgaacggcaggctggtggagataccgttcggataaatttcgttagaggtcagcccttccggttcaaggaagatctgatgctgatttctgtcggcgaagcgcatgactttgtcttcgatcgatgggcagtagcgtgggccgacaccttcgatcacccctgcgtacattgggctacgatcgaggttactgcggatcacatcatgggttttctcgttggtatgagtgatataacacggcacctgctggggatgctgggacgcattgcccataaacgagaataccggcattgggttatcgccatgctgttgcgccagcacactaaagtcgatagttcgagcatcaatacgcggtggtgtcccggttttcagacgaccaacgcgcagcggcagttcacgcaaacggcgagaaagcggaatggacggcggatcaccagcacgaccaccgctgtaattatccagaccgatatgaattttaccgtcgaggaacgtcccaacggtgagcacgacggctttggcacggaacttcagtcccatttgggtaacagcaccgaccacgcgatcgttttcgacaataagatcttcaaccgcctgctggaagatcatcaggttcggttggttctccagcgccgtacgtaccgcctgacggtagagcacacgatccgcctgagctcgggtagcgcgaaccgccggtcctttgcttgcgtttagtatcctaaactggatacccgcttgatcgatcgctttcgccatcagaccgccgagtgcatccacttcttttaccagatgtcccttcccaataccgccgatcgccgggttgcagctcatctgccccagagtgtcgatattgtgtgtcaaaagcagagtctgttgacccatacgcgccgcggccatcgcggcctcggtgcctgcatgacccccgccaatgatgatgacgtcaaaaggatccggataaaacatggtgattgcctcgcataacgcggtatgaaaatggattgaagcccgggccgtggattctactcaactttgtcggcttgagaaagacctgggatcctgggtattaaaaagaagatctatttatttagagatctgttctattgtgatctcttattaggatcgcactaccctgtggataacaaggatccggcttttaagatcaacaacctggaaaggatcattaactgtgaatgatcggtgatcctggaccgtataagctgggatcagaatgaggggttatacacaactcaaaaactgaacaaccgttgttccttggataactaccggttgatccaagcttcctgacagagttatccacagtagatcgcacgatctgtatacttatttgagtaaattaatccacgatcccagccattcttctgccggatcttccggaatgtcgtgatcaagaatgttgatcttcagtgtttcgcctgtctgttttgcaccggaatttttgagttctgcctcgagtttatcgatagccccacaaaaggtgtcatattcacgactaccaataccgattgcgccaaagcggaccgcagaaagatcgggcttctgttcctgcaatgcttcatagaaaggagaaaggttgtccggaatatctccggcaccgtgggtggagctgataatcagccagatccccgaggcagataaatcttccaacagcggaccgtgcagcgtttcggtggtaaaacccgcctcttccagcttttcagccaggtgttctgctacatattcggcaccgccgagggtgctgccgctgataagagtgatatctgccataaaccgccacctttattaagagtggcgtattgtacgctgtgaacgcgttgggatctacctgtggaaaagtatgggattaaaaaagccgattatggcttgatggtacgcatgatcgggttttgcaggacgatcaatgtctcggtggactgaatttcatcaattgtttggatcttgttgataagtacatgctggagagcgtcgatcgaacggcacattacttttataaagatgctgtagtggcctgttgtgtaataggcttcagtgacttcagcaaggctttccagctttgccagcgcggaagggtagtctttggcgctctttaatataatgccgataaagcagcctacgtcataaccgagctgcttcgggctgacatcaatacgcgccccggtaatgatccccgcctgcttcattttctctactcgaacgtgaatcgtccccggactgacgccaaattgtttcgccagttcggcgtaagcggtgcgcgcattgcccattaatgcttccaggatgccacggtccagattgtcgatcagataattttccataggattttcttatgcagattgatgattcattctattttagccttattttttaatgaatcaaaagtgtgttaggctttttattgaatgattattgcatgtttgtcggtttttgttgcttaatcataagcaacaggacgcaggagtataaaaaatgaaaaccgcttacattgccaaacaacgccaaattagcttcgtgaaatctcacttttctcgccaactggaagaacgtctggggctgatcgaagtccaggcgccgattcttagccgtgtgggggatggcacgcaggataacttgtcgggctgtgaaaaagcggtgcaggtaaaagtgaaagctctgcctgatgcccagttcgaagtggttcattcactggcgaagtggaaacgtcagaccttagggcaacacgacttcagcgcgggcgaagggctgtacacgcacatgaaagcccttcgccccgatgaagaccgtctttctccgttgcactcggtctatgttgaccagtgggactgggaacgcgtaatgggcgacggtgagcgtcaattctcgactctgaaaagcacggtagaggcgatctgggcgggaattaaagcaaccgaagctgcggttagcgaagagtttggcctggcaccgttcctgccggatcagatccacttcgtacacagccaggagttactgtctcgttatccggatctcgatgccaaagggcgtgagcgggcgatagcgaaagatcttggcgcggtattccttgtcgggattggcggcaagctgagcgatggtcatcgccacgacgtgcgcgcaccggattatgatgactggagcaccccgtcagagctgggtcatgcgggtctgaacggcgatattctggtgtggaaccctgtactggaagatgcgtttgagctttcttccatggggatccgcgtggatgccgacacgttgaagcatcagttggcgctgaccggtgatgaagatcgtctgcagctggaatggcatcaggcgctgctgcgcggtgaaatgccgcagaccatcggcggcggtatcggccagtctcgtttgaccatgctgctgctgcaactgccgcatatcggccaggttcagtgtggtgtatggccagctgctgttcgcgagaacgtcccttctctgctgtaataatttatcgccgccagcgtctgagcaggcggcttcgcatcccggtatcaaagcgccagatatgatcgaaaatgcgcatgatgccgggtttgccgtgtgccgacatcgccacggcatgaaagcgatgctgatgtacccgctgcagctctttcactttactcgtcacgtcgtcaggcaaccgctgagcgataaaatcagaaatcaccaccgcatcggcatcaaaccattccctgctttgcaagcgttccataatggcgcgaaaacaactggcaagatcggtgccgccacgaaactgctggcttaaaaaacggattgcttgttcgatgccttgggggcctgaaagctcataacggacgatctcggtggaaaatagcataatatagcagcgccggttttcagcgagagcaatgcgcatcaaggccaggcagaacgctttcgcacactgttcattaaagccgcccattgagccggaagtatccacacagacaataaacggcccgcgcggctgttcatcgtaatctttatgtaccaccggacgttcgatcactttttcacgccacgactcaccgtgcaggcgataggtgagcaactgtttttccaccagccgacggtaaaactcatactccagttccgttatccctagtgtcgccagttctggcggcagaagacgtaaaatatcatcgctttgttgcagaccatcaacctgctcaggaaccgtcgccggttcgcgcaccatggtgcggaaggtttccatctgcgcatcgttgcgcggtattgatttggcttcccgagaacgccccagctgctctgccaggcgtttcagttccggctgttcgttaagaaattcaccgtatttcacaatcaactgatagtcgccacgtttaagctgaccggcgctcatatcccacagacgaccagctgcagtattgttatctgcgagaatcggttcaagttgtccgctcagcgtcatgcgttcttgaacttcactcaacagttgttcgcgttcttcttctaatagctgttgatttaacgtcgttgcttgcacgatcagacttaaacgccaacgctggagaaaaagcgtgtgtaacgctgaagttattgtgctgttagcatcaaccaactgccgggcttgttctgcccatggggaattcagacgatgcagtaagtccaggatctgtggtagctgcacaataaactgcggcgtggagaggagctggctttgctgatagcacatcacctcttcggtgagttccggcgggactcgggcatctttcagccgactgcgcagcgcctcacgccagcggggaacatcatcagtgattgccgccttcaggcgtgggaatttttcaaagaagaccgccagctgcggtgaggccagcagtgcgatgatcatctcttcgatcaatccctcttcgctgacggccagcatcacattaagcgtatccagcgttagcattgttgtgcctggtgaatctgtgcaccgacatcctgtaggctggcttcaatgcgacctaaccagtcgccagggataaacagacatttttgctgttcgctgaataaagcgtgttgcttgcgccagtcgctttcaagctcttccagttgttgttttatttcaccaggcagaccttcagccgatgaaccgggaagtgccagcgtactgccttgtaaacttacatcgcgaacgacaagatgttgggcgctatcaacttccagattcagtttctgggcaaagccgataccgttcagtttaccgcgaatttcaccacctttgctcagccactgttccagcgcgctacgctcaaaggagatatgaaccacttccatatcatgcagttttaacggtttttgcagcagtagagtcagagtggaagcagtaacgttaacaggaagttgatactgctgacgacggctgaaaatgccgcccagacgaattaccgttaaggctgttttatcgctttgttgctgctggagttgcaggtgacgttgcacaatcgcgccaaggcgagtcaacatcccttgctgttgccaggcatgaccggtcatcaatacatcaatttgttgttgtatcaaattcaggctttgcgcgtcataccacaggcaatctttcagcaaaatgagatctaccggggcaacagcactgcgaccgctaaaaaaggcgctggcctgcaataatcggatcgcttttttccagcgacgatccgagacataaggcgcatccggtaatttatccagttgctggcgcagcataaaaatcagctcaaatacatgatcgggcagcgtaatttcaccaatctctttctgccagcgttcatattcttcatctgtgacctgcaaggcatcaggaaccggattgtcgttttcatcctgttgactggtcagcatggagcggaaattcgctttatcctgcactttatctaaccacagacgaatcagcatgcggtcatataacgcttccagactgctgtctgcttccggcagctcgttggaggccgccaccagcagacgcatcgggattttttctacgtgtgcaccgttgcggaactggcgctcgttaatggcggtgagcaaggtattaagaattgccgggcccgctttccagatctcatccagaaagacaatttctgcttccggcaggtaaccgctggttaaacgttcatagcgcccttcatcttttagcgcctgaatagaaaggggaccaaaaacttcttccggcgtggagaagcgggtcatcagatattcaaacgcgcgggcattctgaaaggcgaattttaagcgccgggcgatcaaacttttggcaatacctggcgggccaaggaggaacacactttcaccacttaatgccgctaataaacacaagcggatggcgtggctacgttcataaagccccttttccaacgaactgctcaggcgggaaattctttccgctaataaatgagggtgagccataatgaagtggcgtcctttcgtcaaaagttctgcgtaaattgcgagtatagacgtttcttgctggtggctaaaatagtctcaaagggggggaatgccgatcagttaaggatcagttgaccgatccagtggctgtgtaagaatccggaaacgctcacttgtttccggatttttttatgcacattggacaggctcttgatctggtatcccgttacgattctctgcgtaacccactgacttctctgggggattacctcgaccccgaactcatctctcgttgccttgccgaatcaggtactgtaacgctacgcaagcgccgtcttcccctcgaaatgatggtctggtgtattgttggcatggcgcttgagcgtaaagaacctcttcaccagattgtgaatcgcctggacatcatgctgccgggcaatcgccccttcgttgcccccagtgccgttattcaggcccgccagcgcctgggaagtgaggctgtccgccgcgtgttcacgaaaacagcgcagctctggcataacgccacgccgcatccgcactggtgcggcctgaccctgctggccatcgatggtgtgttctggcgcacaccggatacaccagagaacgatgcagccttcccccgccagacacatgccgggaacccggcgctctacccgcaggtcaaaatggtctgccagatggaactgaccagccatctgctgacggctgcagccttcggcacgatgaagaacagcgaaaatgagcttgctgagcaacttatagaacaaaccggcgataacactctgacgttaatggataaaggttattactcactgggactgttaaatgcctggagcctggcgggagaacaccgccactggatgatacctctcagaaagggagcgcaatatgaagagctcagaaaactgggtaaaggcgatcatctggtgaagctgaaaaccagcccgcaggcacgaaaaaagtggccgggactgggaaatgaagtgacagcccgcctgctgaccgtgacgcgcaaaggaaaagtctgccatctgctgacgtcgatgacggacgccatgcgcttccccggaggagaaatggcggatctgtacagtcatcgctgggaaatcgaactgggatacagggagataaaacagacgatgcaactgagcaggctgacgctgagaagtaaaaagccggagcttgtggagcaagagctgtggggtgtcttactggcttataatctggtgagatatcagatgattaaaatggcggaacatctgaaaggttactggccgaatcaactgagtttctcagaatcatgcggaatggtgatgagaatgctgatgacattgcagggcgcttcaccgggacgtataccggagctgatgcgcgatcttgcaagtatgggacaacttgtgaaattaccgacgagaagggaaagggccttcccgagagtggtaaaggagaggccctggaaataccccacagccccgaaaaagagccagtcagttgcttaactgactggcattactgccgaccggtggcccttttttataactgacattaataaattcatctatctttctatataaatatattctgaattatcattaatgtctgataacaaacttgattttttactgtttaaataatatttaaacaataaatttatattttatttttgcgtaattaatattatttttagataaagccgtctctttggtgtactattcctttgaatcaaaaatacacttattaatataagtgatgattcatggtaaaggatatattatatcaatggagtttttatgaagcgtaatattataggcggtgcattcactctggcatctctaatgctggccgggcatgcactggcagaagatggtgttgttcacttcgtcggtgaaattgtcgacactacttgtgaagttacctccgatacagccgatcaaattgtcccactgggtaaagtcagtaaaaatgcattttcaggtgtaggtagtctggcgtcgccacagaagttcagtattaaacttgaaaattgcccggcaacgtacactcaagcagccgttcgttttgatggtacagaagcgcctggcggcgacggcgacctgaaagtgggtacgccgcttacagcaggcaaccctggtgattttaccggtacaggacaagcgattgcggcaaccggcgttggtattcgtatttttaaccagtccgataattcgctggttaaactttataacgactctgcttataccgctatcgatgctgaaggcaaggctgaaatgaagtttattgcacgctatgtggcaaccaatgcgaccgtaacggctggtacggcgaacgctgattcacaatttactgtcgaatataagaaataatttatcaagggcctttttattcagttggctttggccagggagtcgttatgtccagaaaaagttgtttaatcaggctctttaaaacaacagtttcatgtaagttatttaccgcgattatactcagcgtttttttaggccaaccagcattaacttatgcaggcgttgtcattggtggtacgcgggtggtttacttaagtaataatgctgataaatctatttctgtatttagcaaagaagaaaaaataccttatctcatccaggcttgggtagatccatttaataaagaggataaaagcaaagcgccgtttaccgttattccgccagtatcacgattagaaccttcgcaagaaaaaatattacgcattattcacaccaaaggtgtgtcattgcctgatgatcgcgagtcagtcttctggctgaatattaaaaatattccgccatcagcgagcaacaaagcgacgaactcgctggaaatagcagtaaaaacgcgtatcaagctgttctggcgaccagcaaatatccgccttattcccgaagatgctgcgccgaaagtgaaatggcgccgggaagggcgaaatctgatagcagagaatcccaacccaattcatatcagtgtgatggatgtcatcgttgatggccatgatgtgcccctcaatatgatccgtccttttgaaacgctcacgttacctttacctgctaattctgcgggaggccaaatgacctggcgatttattaatgattacggcgcagtcagtgacccgataaaaatgacgctgtaagcaagggataaggataggcgtattatgatgacgaccagaatagtggttggcctcacggcagggacgtgtctgattttctcgcaaaacctgatggccgaggtcagtgtattcaatccggcgcttctggaaatcgaccatcaatccggagtcgatattcgccagtttaatcgggcaaacctgatgcccccaggtgtttatagcgttgatatttttatcaacggtaaaatgtttgaacgtcaggatgtgacatttgttcaggataatccagatgctgatctgcacgcttgctttattgccattaaaaaaacactgtcctcctttggcataaaagttgatgcgctcaaatcgttcaatgatgtggatgagacggtttgcctcgatcctgctccacgtattgaaggctcatcctggcagtttgacagtgataaattgcagctgaatatatccattccccaaatctacatggacgcgatggcttatgattacatcagccccacgcgttgggatgaggggattaacgcgctcaccatcaactacgatttttctggttcacatacactacgttcagattatggttcacaagagacagataccagttatctcaatctgcgcaatggactgaatattggaccgtggcggctacgtaattacagtactttaaacaccagcgatggctgtgcggaatacaactccattagtacctggatacagcgcgatattgccgcgttaagaagccagattatgattggtgatacgtggacggcgagcgatattttcgacagtacgcaaattcgcggcgcgcgtttgtatactgataacgatatgctacccgccagccagaatggctttgctcctgtggttcgtgggattgcaaagtccaacgccaccgtcatcattcggcagaatggctacgtgatttatcagtctgccgttccacaaggtgcttttgagatcaccgatctcaacaccgccagtacaggtggcgatttggacgtaaccatcaaagaagaagacggtagcgaacaacgattcacccaaccttatgcttcattagcgattcttaaacgtgaaggtcagacagatgttgatgtcagcgtgggtgaattgcgcgatgaagacggatttacaccggacgtccttcaggcgcaaatacttcatggtttttcccacgggatcactttatatggaggtatgcaggctgctgaaaattatggttctgcagctctgggtgtcggtaaagatcttggcgctttgggcgcaatttctttcgatgtgacacatgctcgtgcgaattttagccatgatgatacagaaacgggtcagtcatatcgctttctctattcaaaacgatttgacgacacagacactagcttgcgcttggttggctatcgttactccaccgagggctactataccctcaatgagtgggcatcgcggcgcaacagccctgaagacttttgggaaacaggtaaccgacgtagttgcgtggaggggacgctaacgcagtcgttggggagagattatggcaatttatacctgacattaagccggcaacaatactggcataccgatgatgtcgaacgattaatgcaatttggctacagcagtagctggaagcgtctctcgtggaacgtctcctggagttattccaatactgccagacaggggacggggaacaaccatgccagtgataacaccagtgagcagatctacatgctctctttatctgttcctttattgggctggtggggtaatagttacgccacctattctgtttcgcaaaacgataattccggtagctcacatcaactcggactcagcggtacggcgctggaaagaaataacctttcatggaatttaatgcagtcctataacagtcatgatgatgaggttggcggtaatatgtccctgacctatgatggctcttatggcacggtgaacggcagctataactacagccaaaattcccagaggctgaattatggtatcagagggggaattctggcacacagcgaaggggtaacgttaagtcaggagttaggtgaaactattgctcttgttaaagcacctggggccgccgggttagaaatagataatatgcgcggtgctgcgacggactggcgcggctatacggtcaagacacagctaaacccttatgatgaaaatcgggtagcaatcagcgataactatttctcgaagtcgaatatagaacttgataataccgtcgttacgatggttcccacgcgtggtgcagtggttaaagcggagtttgtgactcatgtgggttatcgcgttctcttcagagtgttaaatgcaaatggtaaaccggtaccttttggagccattgctgcgatacaagatgcaagtttggcagattcaggaattgtcggtgaccgtggcgaactttatctttctggtctaccagaaaaaggacaggttacgttatcctggggagaaaacgcctcaacaaaatgcatcttcaattattcactttcgacaccagaaagtgagagcggattaattgaacagggtgtgacatgtcattaaaaggatttttatgaacaagtatatcaaacagtggtgctttgctgtgtttatgctctcgttaagtagtgtagcacttgcagctcctaaaggtatctgtacccctgataatggcgtatttcaccgtacgcttgatttctcgggatatcttattaccgcgaacgaaaataaggttggaacgacatttaataccactgtaactaatggatcctcatatcctggacgctgtcattgtgatactggtaatgtaggagaattcccctatatctattatacgtcaaaaataaaccaggcattaacttatgctggggttcactctaatattaattattatgatcttaatccgaaccttgatgttgggattgctatagatattcttggggttgggtatgtgaatgcaccttttgaatatcatgctaacaacccgtctggtaatacaaagtacaattgcaaccgcattgaacctttaagtatatccagtgggggtaaagcgatagtatatttttatatcaagaagacatttgcaggaaaattgattattcctgaaacaaagatagtgacattgtatggaacaattagccgtgacaccccggtggattactcacagccgatggctgatgtttatattcggggcgatattacagctccgcaaagttgcgaaataaataatttacagccagtttattttgattttaaagaaataccagctgcagatttttcatctgttgttggaagtgcggtaacaacacataaaattactaaaacagtcactattgagtgtgaaaacctggggatactgaataccgatgatatcagtacgtctttttatgctaccgaacccaatacggacaattcaatggtcgtaacttcaaactctaacgtggggataaaaatttacgacaaaaataataaggaaatcaaagtgaacggtggtgagttgccaacagacatgggtaaatcaacagtgtatggtgaaaaatcaggtagtgtaactttttcagctgctcctgcgagccttactggagctcgcccagccccggggcaatttactgcaacagcgacgataactgttgagattgtgcgctaataggtctgacaacgattgttcatcacatcgttgtcatctcacccatttctttatcacttttaaatgcatcatgacaaaaagatgacatgtgggattttcatcttcacatttaaaatcagtaagttatttgttaattcctttctgtcataaaaatgtcatattccttacatataactgtcacctgtttgtcctattttgcttctcgtagccaacaaacaatgctttatgaatcctcccaggagacattatgaaagttatgcgtaccaccgtcgcaactgttgtcgccgcgaccttatcgatgagcgctttctctgtgtttgcagaagcaagcctgacaggtgcaggtgcaaccttccctgcgccggtgtatgccaaatgggctgacacttaccagaaagaaatcggtaataaagttaactaccagggtatcggttcttccggtggcgtaaaacagattatcgctaataccgttgattttggtgcctctgacgcgccgctgtctgacgaaaaactggctcaggaaggtctgttccagttcccgaccgtgattggcggcgtggtgctggcggttaacattccagggctgaagtctggcgaactggtgctggatggtaaaaccctcggcgacatctacctgggcaaaatcaagaagtgggatgatgaaaccatcgccaaactgaatccgggtctgaaactgccttcacaaaacattgctgtagtacgccgcgcagatggctccgggacttccttcgtcttcaccagctacctggcgaaagtgaacgaagagtggaaaaacaacgttggtactggctctaccgtaaaatggccgatcggtctgggcggtaaaggtaacgacggtatcgccgcgttcgttcagcgtctgccgggtgcaattggttatgttgaatatgcttacgcgaagcagaacaacctggcgtacaccaaactgatctccgctgatggtaaaccggttagtccgaccgaagaaaacttcgctaatgcagcaaaaggtgcagactggagcaaaaccttcgctcaggatctgaccaaccagaaaggcgaagatgcatggcctattacctctaccacgttcattctgatccacaaagatcagaagaaaccagaacaaggcacagaagtgctgaaattcttcgactgggcgtacaaaaccggggctaaacaggcgaacgacctggattacgccagcctgccggatagtgtagttgaacaggttcgcgctgcgtggaagaccaatattaaagacagtagcggtaagccgctgtactaataaaactctaggccgggtacggtgttttacgccgcatccggcattacaaaatgactttgtaaacgcgtttaactgaagagtaacttatggctgcaaccaagcctgcttttaacccaccgggtaaaaagggcgacataattttcagcgtgctggtaaaactggcggcgctgattgtgctattgatgttgggtggcattattgtctctctgatcatctcctcctggccgagcattcagaaatttggtctggctttcctatggaccaaagagtgggatgcaccgaacgatatctacggggcgctggtgccgatctacggtacgttggtgacttcgtttatcgcgctgctgatcgccgtcccggtgagtttcggtatcgccctgttcctgactgagcttgcgcctggctggctgaaacgcccgctgggtatcgccattgagctgctggcagccattccaagtatcgtttacggcatgtggggcctgtttatctttgcgccgctgttcgccgtttactttcaggagccggtcggcaatatcatgtcgaatatcccgattgttggcgcgctgttctctggccccgcatttggtatcggtatcctcgcggcaggcgtgatcctcgccatcatgattattccgtacattgcggcggtaatgcgtgatgtgttcgaacaaaccccggtgatgatgaaagagtcggcctacggtattggctgcaccacctgggaagttatctggcgtatcgttcttccgttcaccaaaaatggtgttatcggcggcatcatgctggggctgggccgcgcgctcggtgaaaccatggcggtgacctttatcatcggtaacacctaccagctcgacagcgcctcgctgtacatgccgggcaatagtatcacctctgcgttggcgaacgaatttgcggaagcggaatccggtctgcacgttgccgcactgatggaactgggcctgatcctgtttgtgattaccttcatcgtcctcgccgcatcgaagtttatgattatgcgcctggctaagaatgagggggcacgctaatggctatggttgaaatgcaaaccactgcggcgctggctgaatctcgccgcaaaatgcaggcgcgtcgccgcctcaaaaaccgtattgcgctgacgctctcgatggcgacgatggccttcggcctgttctggctgatctggattttaatgtccaccatcactcgcggtatcgacggtatgtcgctggcgctgttcactgaaatgacgccgccgcccaatacggaaggtggtggtctggcgaacgccctggcgggtagcgggctgttaattttgtgggccacggtattcggtacgccgctgggcattatggcggggatttatctggcggaatatggtcgtaaatcctggctggcagaagtgattcgcttcattaacgacattctgctctccgcgccgtcgattgtggttggtctgtttgtctacaccatcgtggtggcacagatggagcacttctccggctgggcgggcgtaattgcgctggcgctgttgcaggtgccgatcgttatccgcaccaccgagaacatgctgaaactggtgccggacagcctgcgtgaagcggcttatgcgctgggtacaccgaagtggaagatgatctccgcgattacgctgaaagcgtcggtgtccgggattatgaccggtatcctgctggcgattgcccgtattgccggtgaaaccgcgccgctgctgtttaccgcgctctccaaccagttctggagcacggacatgatgcagccgatcgccaacctgccggtgacgatctttaagtttgcgatgagcccgtttgcggaatggcaacaactggcctgggccggggtattgatcattaccctgtgcgtcctgctgctgaacattctggcgcgcgttgtttttgcgaagaataaacacggttaacactttgccggatgcggcgtgaacgccttacccggcctacggtaagcctgattagcgaaaagcatcaggtacgatgaggaaaagattgcaatgagtatggttgaaactgccccgagtaaaattcaggttcgtaatttgaacttctactacggcaaattccatgccctgaaaaacatcaacctggatatcgctaaaaaccaggtaacggcgtttatcgggccgtccggctgcggtaaatcgacgctgctgcgtaccttcaacaaaatgtttgaactgtatccggagcagcgcgcagaaggtgaaattctgcttgatggcgacaacatcctgaccaactctcaggatatcgcactgctgcgtgcgaaagtgggcatggtgttccagaaaccgacgccgttcccgatgtccatctacgacaacatcgcttttggtgttcgtctgtttgagaagctctcccgtgccgacatggacgagcgcgtgcagtgggcattgaccaaagccgcattgtggaacgaaaccaaagataaattgcaccagagcggttactctctctctggtggtcagcaacagcgtctgtgtattgcgcgtggtatcgccattcgcccggaagtgctgctgctcgacgaaccgtgttcggcgctcgaccccatctctaccgggcgtattgaagagctgatcaccgaactgaagcaggattacaccgtggtgatcgttacccacaacatgcagcaggctgcgcgttgttccgaccacacggcgtttatgtacctgggcgaattgattgagttcagcaacacggacgatctgttcaccaagccagcgaagaaacaaacagaagactacatcaccggtcgttacggttgattcaggagtgcgttatggacagtctcaatcttaataaacatatttccggccagttcaacgccgaactggaaagtatccgcacgcaggtgatgaccatgggcggcatggtggagcagcagctttctgatgcaatcaccgcgatgcataaccaggacagcgatctggcgaagcgcgtgatcgaaggcgacaagaacgtcaacatgatggaagtggcgatcgatgaagcctgcgtgcgcattatcgccaaacgtcagccgacggcgagcgacctgcgactggttatggtgatcagtaaaaccattgccgagctggagcgtattggcgacgtggcggacaaaatctgccgtactgcgctggagaaattctcccagcagcatcagccgttgctggtaagtctggagtcgctgggccgtcataccatccagatgctgcacgacgtgctggacgcgttcgcgcggatggacattgacgaagcggtacgtatttatcgtgaagataaaaaagtcgatcaggaatacgaaggtattgttcgtcaactgatgacctacatgatggaagattcgcgtaccattccgagcgtacttactgcgctgttctgcgcgcgttctatcgaacgtattggcgaccgctgccagaatatttgtgagtttatcttctactacgtgaaggggcaggatttccgtcatgtaggcggtgatgagctggataaactgctggcgggaaaagatagcgacaaataattcaccagacaaatcccaataacttaattattgggatttgttatatataactttataaattcctaaaattacacaaagttaataactgcgagcatggtcatatttttatcaatagcgcattgctattttctctgcacgcaattaaattaatttccgaacctggatgttcgttataaaaaccattaataaatgactggattgttactgcattcgcaggcaaaacctgacataaccagagaatactggtgaagtcggttttttttgtttataaaaaaggtccttgctatgaacatgcaaatcaccaaaattctcaacaataatgttgtggtggttattgatgatcaacagcgggaaaaagtcgtcatggggcgaggaattggctttcaaaaatgcgctggcgaaagaattaactcaagtggaatagaaaaagagtatgccttgagcagtcatgaactgaacgggcgattaagcgaactcttaagtcatattcctcttgaggtgatggcaacctgtgatcgtattatctctttagcgcaggagcgcttgggaaaattacaggacagtatttatatctcgctaactgaccattgccagtttgcgattaaacgctttcagcaaaacgtgttgctgcccaacccgttgctgtgggatatccagcggctttacccgaaagagttccagctaggggaagaagcgttaaccattattgataaacggttgggcgtgcagttaccgaaagatgaagtgggctttattgccatgcatctggtcagtgcccaaatgagcggaaatatggaggatgttgcaggtgtcacgcagttaatgcgcgaaatgctgcaattaataaaatttcagttcagccttaattaccaggaagaaagcttgagttatcagcgactggttacacatctgaagtttttatcctggcgtattcttgaacatgcttcaattaacgatagtgatgaatcattacaacaagcagtaaaacaaaattacccgcaagcatggcaatgtgcggaacggatcgccatttttattggtttgcagtatcaacgtaaaatttcacccgcagagattatgtttttagccataaatatagagcgcgtgcgcaaagaacactgaaatattattactgagtaaaggattgttaccgcactaagcgggcaaaacctgaaaaaaattgcttgattcacgtcaggccgtttttttcagtttttttttgggagttttgccgcaaagcggtagagggcaagttatgacggagttagccagaaaaatagtcgcaggagtcgggggcgcagataacattgttagtctgatgcattgcgcaacgcgattacgttttaagttaaaggatgaaagcaaagcgcaagctgaggtactgaaaaacacccccggtattattatggtggtggaaagcggtggccagtttcaggtggtcataggtaaccatgtggccgatgtcttcctggcggtcaacagcgtggcaggccttggcgaaaaagcgcaacaggcaccggaaaatgatgagaaaggtaatctgctaaaccgctttgtttatgttatttcaggtatttttacgcctctgatcggtttgatggcggcaaccgggatcctgaaaggtatgctggctctggcgctcacttttcagtggacgaccgaacaaagtggtacttatttaattttattcagcgccagtgatgccttgttttggttcttcccgataatcctgggatacaccgcggggaaacgcttcggcggtaatccatttactgccatggtgattggtggagcgttagtgcatccattaattctgactgctttcgagaacgggcaaaaagcggatgcgctggggctggatttcctgggtattccggtcacattgttgaattactcgtcatcggttattcccattattttttctgcctggttgtgcagcattctggaacgccgacttaatgcgtggttaccgtcggcaatcaaaaatttcttcacaccattgctatgtctgatggttatcacacccgtcacctttctgctggtggggccgctatcaacctggataagcgaactgattgccgccggttatctctggctttatcaggcggttcctgcatttgcgggcgcggtaatgggcggcttctggcaaatcttcgtcatgttcggactgcactggggcctggtgccgctgtgtatcaataacttcaccgtgctgggctacgacaccatgatcccgctgttaatgcccgccattatggcgcaggtcggggcggcgctcggcgtcttcctctgcgaacgcgatgcgcagaaaaaagtggtggcgggatcagcggcgttgacgggcctgtttggtatcaccgaaccagcggtatatggcgttaatctgccgcgtaagtacccctttgttatcgcctgtatcagtggggctttgggggccaccatcattggctacgcgcaaacgaaagtgtactcctttggtttgccaagtattttcaccttcatgcaaaccatcccgtcaacgggaattgatttcaccgtctgggccagcgttattggcggtgtcattgccatcggttgcgcatttgtcggtacggtgatgcttcatttcatcaccgctaaacgtcagccagcgcagggtgccccgcaagagaaaacaccagaggttattacaccacctgagcagggcggtatctgttcaccgatgacgggagagattgtgccgctcattcacgtcgctgataccacgtttgccagtggcctgttgggtaaaggtatcgccattctgccctcggttggtgaagtgcgttctccggttgcgggtcgaattgcttcgttgttcgccacattacacgccattggcattgagtcagatgatggtgtggagatcctgattcatgtcggtatcgacaccgtaaaactggacggcaaattcttttccgctcacgtcaacgtgggtgacaaggtcaatacaggcgatcggctgatttcttttgatatccctgctattcgcgaggccggatttgatgtgacgacgccggtattaatcagtaatagcgatgattttacagacgtattaccccacggcacggcgcagataagcgcaggtgaaccgctgttatccatcattcgctaacgataaaaggagttaattatgaaagcatttccagaaacatttctttggggtggcgcaacagctgccaatcaggtggaaggtgcctggctggaagatggcaaagggagcacgacctcagatttacagcctcatggcgttatgggaaaaatggaaccgcgcatcctggggaaagagaatatcaaagatgtcgccatcgatttttatcaccgttacccggaagatatcgcgttatttgccgagatgggcttcacctgtctgcgtatttccattgcctgggcgcgaattttccctcagggcgacgaagccgaaccgaatgaagcggggttagcgttgatatgactttccgtgtcaaaccggaatctctaattttgacgattttctttttaggtttaattccctgagggcgacgtagcagtaaatccgacggtgaatcacgctgatattcgcgggttggataccgcattacagaggtccgtcatatgagcctgccactttcttacgtcgcgaatcagctttgttccgccgtcgccaagcgctaacgtgggttactcttgtaccgggctacgtcgccttcagggaactggttattctcattttttatttgtgacattgtggttgttgtgcgacagacattgctattcggcccatatcccagataaaacccgccagctcacgtgcaacagcaacaattgtaatattgacattctttcctttggcctgaagttttcgatacctcttacaaagcctgagttgagcatcccatgctctgtcaatgacggggcggggtaaattttcctgcctttttgtattgccggactgatgcgtgccggatgacggtaactccacgctgcctcgaccaatagctttctggcatagctgtttccggctttggtaatgctgccctgatgtctgcttccacccgatgaatattctgatggcgtgataccaaaccatgacatcagttgtcgtggatgttcaaaacgggtcagatcacccagttcagaaattaatccaaccgcagtaataaactgaatccctcgcatggcttgcagcgcctctactaccggatacagcctccattcggtaacggcctccttcagggcggattccagccgttcacattgtgcctgccgatcttctattgtacgacggtgttcgtcaaaagctaattgtcgccagggactttcgaatgagtatttgctgagccagcgtcggtgtgcagggccccaatctgctcgcccgacataatggaccccatgaaccagaagaaacgatttcagacgttgccttgcatgccgtaaatcatcgcgggcagatgcccatgcccgggccaaatcccggaatgcctcatcttcaatgccgggtacgtagacagcagaaagatctcctgcacgcagtgaacgcacaagtctgatggcatcacggcgatcggttttaacccgctcccccggttttttcgggataagtgagggggcgcagaccatgcagtcaaaaccggatttcaccagccgacgataaagtccataaccacagggccccgcttcataaacgatactgacctgcgatgactttgacctgagacgtttacaaagattctgaatatcagtaggtgatgtgccaattttacccatcagttcaacaggttctgaattgatagcataagcgacagtaatcgattctttgtgaacatctaacccgacgtacaatgtgttattgttgttcatgctggcctccgtggtggaaataccggggtgtagcaacagctcacccatgcggctctgacaacgatgttaacccgcgttaaatatcccacgttggccagcatctgtctcacggaaagtcatactgccttacgatcggctgtttgatgaaatggcgcaggcggggatcaggccgctggtaacgttatcccattacgaaatgccatatgggctggtgaaaaactacggcggttgggctaatcgggcggtcatcgatcacttcgagcattacgcccgcacggtctttacccgctaccaacataaagtagcgttatggctgacgtttaatgaaatcaatatgtcgttacacgcgccattcacgggcgtggggctggcagaagagagtggcgaggcggaagtttatcaggcgatccatcatcaactggttgccagtgcgcgggcagttaaagcctgtcatagcctgatccccgaagcgaaaatcggcaatatgcttctcggtgggctggtttaccccctcacctgccagccacaggatatgttgcaggccatggaagagaaccggcgctggatgttctttggtgatgttcaggcgcgtggccagtatcccggctatatgcagcgtttcttccgcgaccacaatatcaccattgagatgactgaaagtgacgcagaagatttaaaatatactgtagatttcatctcttttagttattacatgactggttgtgtttcccacgacgaaagcattaataaaaatgcgcagggcaacatactgaatatgatccccaatccgcatctgaaaagttcagagtgggggtggcaaattgatccggttggattacgggttctgttaaatacgctttgggatcgttatcaaaaaccgttatttattgtcgagaacggattaggcgcaaaagacagcgttgaagcggatggttcgatacaggacgattatcgaattgcctatttaaacgatcacctggtacaggtaaatgaagcgattgccgatggtgtggatattatggagtacaccagttgggggccaattgatttagtcagtgcatctcattcacaaatgtctaagcgctacggctttatttatgtggatcgtgatgataatggcgaaggaagcctcacaagaacgcgtaagaaaagcttcggatggtatgcagaagtgatcaaaacgcgggggctgtcattaaaaaaataaccaataaagcaccttaattatcgtcgcattcagaacagtctggatgcgatacgttaattctttctttgcaccataaagggatattatgtttagacgaaatcttattacctctgccatcttattaatggcaccgttagccttttctgcacaatcattggctgaatcattaacggtggaacaacgccttgagttattagaaaaagcgttaagagaaacgcaaagcgaactcaaaaagtataaagatgaagagaagaaaaaatatacgccagcgacggtgaatcgtagcgtaagtacgaatgatcaagggtatgccgccaatccgttcccgaccagtagtgccgcaaaacctgatgctgtactggtcaaaaatgaagagaaaaatgccagtgagacaggttcgatttattcttccatgactctgaaagatttcagtaagtttgtgaaagatgaaattggctttagttacaacggctattaccgttctggttgggggaccgcctctcatggttcacctaaatcatgggcgattggttctctgggccgctttggtaacgaatactccggctggtttgatttgcagttaaaacaacgtgtctacaacgaaaacggcaaacgggttgatgccgttgtgatgatggatggtaacgttggtcagcagtactctaccggctggtttggcgataacgccggtggcgagaactttatgcagttctccgatatgtacgttaccaccaaaggtttcctgccctttgcgccagaggctgatttctgggtgggtaaacacggtgcgccgaaaattgaaatccagatgctggactggaaaacgcagcgtactgatgccgcagcgggtgtaggtctggaaaactggaaagtcggtccgggtaaaattgatatcgcgctggttcgcgaagatgtcgatgattacgatcgcagcctgcaaaacaaacagcagattaataccaatactattgatttacgctataaagatatcccgttatgggataaagcgaccttaatggtgagtggtcgttatgtcacggcaaacgaaagcgcatcggaaaaagataatcaggataataacgggtattatgactggaaagatacctggatgttcggcacatctttaacgcagaaatttgataaaggtggcttcaacgaattctccttcctggttgcgaataactctatcgccagtaactttggccgttatgctggcgcaagtccatttaccacctttaatggtcgttattatggtgatcacaccggcggaacagcagttcgtctgacctcgcagggcgaagcctatatcggcgatcattttattgtggctaacgcgattgtttactccttcggtaacgatatttatagctacgaaacaggcgcacactctgatttcgaatctattcgtgcggttgttcgcccggcctatatttgggaccaatataaccagacaggtgttgaactgggctatttcacccagcaaaacaaagatgcgaatagtaataaatttaatgagtctggttataaaaccacgctcttccatacctttaaagtcaataccagtatgttgacctcgcgtccggaaattcgtttctacgccacgtatatcaaagctctggaaaacgaactggatggcttcacctttgaagacaataaagacgaccagtttgctgtcggtgcgcaggctgaaatctggtggtaatggaacttaatgaaaggaatattacgatgaatataaaaattgctgctttaacgctggctattgccagcggtatttctgctcagtgggccatagcagcggatatgccagccagcccggcacccactattccggttaaacagtatgtgactcaggtcaatgccgataacagcgtgacctttcgctactttgcccctggggcaaaaaacgtctccttagtggtgtaatgccgatcagttaaggatcagttgaccgatccagtggctgtgtaagaatccggaaacgctcacttgtttccggatttttttatgcacattggacaggctcttgatctggtatcccgttacgattctctgcgtaacccactgacttctctgggggattacctcgaccccgaactcatctctcgttgccttgccgaatcaggtactgtaacgctacgcaagcgccgtcttcccctcgaaatgatggtctggtgtattgttggcatggcgcttgagcgtaaagaacctcttcaccagattgtgaatcgcctggacatcatgctgccgggcaatcgccccttcgttgcccccagtgccgttattcaggcccgccagcgcctgggaagtgaggctgtccgccgcgtgttcacgaaaacagcgcagctctggcataacgccacgccgcatccgcactggtgcggcctgaccctgctggccatcgatggtgtgttctggcgcacaccggatacaccagagaacgatgcagccttcccccgccagacacatgccgggaacccggcgctctacccgcaggtcaaaatggtctgccagatggaactgaccagccatctgctgacggctgcagccttcggcacgatgaagaacagcgaaaatgagcttgctgagcaacttatagaacaaaccggcgataacactctgacgttaatggataaaggttattactcactgggactgttaaatgcctggagcctggcgggagaacaccgccactggatgatacctctcagaaagggagcgcaatatgaagagctcagaaaactgggtaaaggcgatcatctggtgaagctgaaaaccagcccgcaggcacgaaaaaagtggccgggactgggaaatgaagtgacagcccgcctgctgaccgtgacgcgcaaaggaaaagtctgccatctgctgacgtcgatgacggacgccatgcgcttccccggaggagaaatggcggatctgtacagtcatcgctgggaaatcgaactgggatacagggagataaaacagacgatgcaactgagcaggctgacgctgagaagtaaaaagccggagcttgtggagcaagagctgtggggtgtcttactggcttataatctggtgagatatcagatgattaaaatggcggaacatctgaaaggttactggccgaatcaactgagtttctcagaatcatgcggaatggtgatgagaatgctgatgacattgcagggcgcttcaccgggacgtataccggagctgatgcgcgatcttgcaagtatgggacaacttgtgaaattaccgacgagaagggaaagggccttcccgagagtggtaaaggagaggccctggaaataccccacagccccgaaaaagagccagtcagttgcttaactgactggcattactcaaagggggggtatttttctttgagccaggttaatgtggccgcatttaggagtacgattttgccgttaatcgtgcatactgtgcgcttttttgtgggccaagggactaagcacacatttcatatttcaacgaaagactagtctatgagcactgataataagcaatcattgcccgcgattaccctcgcggcgattggagttgtctacggcgatattggtaccagcccgttatatacacttcgtgaatgtttgtccggccagtttggttttggcgttgaacgcgatgccgtgtttggctttttatcgctgatcttctggctgctaatctttgtggtttccattaaatatctcaccttcgtgatgcgggcagataacgccggtgagggggggatcctgacgttgatgtcgcttgccgggcgtaatacgtcggcgcgaaccacatcaatgctggtgattatggggctaatcggcggcagctttttctatggtgaagtcgtcataacacccgctatttcggtgatgtcagccattgaaggtctggaaatcgtcgccccgcagctggatacctggatagttcccctctcaattatcgttctcactttattatttatgattcaaaagcatggcacggctatggtcggtaagctgtttgcgccgatcatgctgacctggtttttgattctggcaggactggggttacgtagcattattgctaacccggaagtgctgcatgcgctgaatccgatgtgggcgatgcatttcttccttgaatacaaaacggtttcttttattgcattaggggcagtggtgttgtcgattacgggggtcgaggcgctgtatgctgatatggggcactttggtaagttccctattcgcctggcgtggttcaccgtcgtattaccttccttgacccttaattacttcggtcagggagcgctgttgttaaagaacccggaagcgattaagaacccgttcttcctgttggcaccggactgggcgctgatcccgctgctgatcatcgccgcactggcgacggtaattgcctcgcaggcggttatctctggcgtcttctcattgacgcgtcaggcggtacgtctgggatatttgtcgccgatgcgcattattcacacctccgaaatggagtcagggcaaatctatattccgtttgtgaactggatgctctatgtcgcggtcgtgattgtgattgtcagctttgagcactccagcaacctggcggcggcgtacgggattgcggtgaccggaaccatggtgctgacgtctattctctcgactaccgtggcacgtcagaactggcactggaataagtattttgttgcgctgatcctgattgctttcctttgtgtcgatattccattgttcaccgctaacctcgataaactgctctccggcggctggttgccattgagcctcggtactgtgatgtttatcgtgatgaccacctggaagagcgagcgtttccgcttgctgcggcggatgcatgaacatggtaactctctggaagcgatgattgcttcgctggagaaatcaccgcctgttcgcgtgcccgggaccgcggtgtatatgtcgcgtgcaatcaacgtcattccctttgcgctgatgcataaccttaaacataacaaggtattgcatgagagggtgattctgttaactctgcgcaccgaagacgcgccatatgtccataacgtccgtcgggtacagattgaacaactgtcgcccactttctggcgcgtggtggcaagttatggttggcgagaaacgccaaacgtggaagaagttttccaccgctgcggtctggaaggattaagttgccggatgatggaaacctccttctttatgtcgcatgagtcgttgatcctcggcaaacgcccgtggtatttgcgtctgcgcggcaagctgtacttgctgctgcaacgtaatgcgctgcgtgcaccagatcaatttgaaatcccgccaaacagggttatcgaactgggtactcaggtcgaaatctaacgctagacgcctcctttctccataagggggcgtttttgttttcatggttaatcaccatgtaaaacgtttcgaggttgatcacatttccgtaacgtcacgatggttttcccaactcagtcaggattaaactgtgggtcagcgaaacgtttcgctgatggagaaaaaaatgaaaaaaggcaccgttcttaattctgatatttcatcggtgatctcccgtctgggacataccgatacgctggtggtgtgtgatgctggtttacccatccccaaaagtacaacgcgtatcgatatggcattaacccagggtgtaccttcttttatgcaggtgctgggcgtcgtcacaaatgaaatgcaggtcgaggctgccattatcgcggaagagatcaaacaacataatccgcaactccacgaaacgttgctcactcaccttgagcagctgcaaaaacaccagggaaataccattgaaattcgttacaccacgcatgaacaattcaaacaacaaaccgcagaaagtcaggcggtaattcgcagcggagaatgttctccgtatgcgaatatcattctctgtgctggcgtgacgttctgaggccgtcatggaagcattacttcagcttaaaggcatcgataaagccttcccgggcgtaaaagccctctcgggcgctgcgttaaatgtctatccgggccgcgtgatagcgctggtgggcgaaaacggcgcgggtaaatccaccatgatgaaagtgcttactggtatctatactcgcgatgccggcacgcttttatggctggggaaagaaacgacatttaccgggccgaaatcttcccaggaagccgggattgggattatccatcaggaactgaacctgatcccgcagttgaccattgccgaaaacattttcctcggtcgtgagtttgttaatcgctttggcaaaattgactggaaaaccatgtatgccgaagcggataaattgctggctaaacttaacctgtgctttaaaagcgacaagctggtgggcgatctttccatcggtgaccagcaaatggttgaaatcgccaaagtgctgagctttgagtcgaaagtcatcattatggatgaaccgaccgatgcgctgaccgataccgaaaccgaatccctgttccgcgtcatccgcgagctgaaatcgcaaggccgcggtattgtctatatctcccaccgcatgaaagaaatcttcgagatttgcgatgacgttaccgtttttcgtgacgggcaatttattgctgagcgcgaagtggcatcactgaccgaagattcgctgattgagatgatggtgggccgcaagctggaagatcaatatccacacctggacaaagcgccgggagatatccgcctgaaagtcgataatctctgcggacctggcgttaacgatgtctcttttactttacgcaaaggcgaaattcttggcgtctctggtttgatgggcgcaggtcgtaccgaactgatgaaagtgctctacggcgcacagccgcgcaccagcggttacgtcaccctggatgggcatgaagtcgttacccgttcaccgcaggatggcctggcaaacggcattgtgtatatctccgaagaccgtaaacgtgacggtttagtgttgggcatgtcagtaaaagagaacatgtcgctgacagcgctgcgctacttcagccgcgctggcggcagtttgaagcatgccgatgaacagcaggcagtgagtgatttcattcgtctgtttaatgtgaaaacaccgtcgatggaacaggcaattggtctgctttccggtggcaatcagcaaaaagtggcgattgcccgcggtctgatgacacgccccaaagtgttgatccttgatgaacctacccgtggcgtagatgtcggcgcgaaaaaagagatctatcaactgattaaccagttcaaagccgatggcttgagcatcattctggtgtcatcggagatgccagaagtattaggcatgagcgatcgcatcatcgtcatgcatgaagggcatctcagcggggaatttactcgtgagcaggccacccaggaagtgttaatggctgccgctgtgggcaagcttaatcgcgtgaatcaggagtaaaaaaatgacaacccagactgtctctggtcgccgttatttcacgaaagcgtggctgatggagcagaaatcgcttatcgctctgctggtgctgatcgcgattgtctcgacgttaagcccgaactttttcaccatcaataacttattcaatattctccagcaaacctcggtgaacgccattatggcggtcgggatgacgctggtgatcctgacgtcgggcatcgacttgtctgtaggttctctgttggcgctaaccggcgcagttgctgcatctatcgtcggcattgaagtcaatgcgctggtggctgtcgctgctgctctcgcgttaggtgccgcaattggtgcggtaaccggggtgattgtagcgaaaggtcgcgttcaggcgtttatcgctacgctggttatgatgcttttactgcgcggcgtgaccatggtttataccaacggtagcccagtgaataccggctttactgagaacgccgatctgtttggctggtttggtattggtcgtccgctgggcgtaccgacgccagtctggatcatggggattgtcttcctcgcggcctggtacatgctgcatcacacgcgtctggggcgttacatctacgcgctgggcggcaacgaagcggcaacgcgtctttctggtatcaacgtcaataaaatcaaaatcatcgtctattctctttgtggtctgctggcatcgctggccgggatcattgaagtggcgcgtctctcctccgcacaacccacggcggggactggctatgagctggatgctattgctgcggtggttctgggcggtacgagtctggcgggcggaaaaggtcgcattgttgggacgttgatcggcgcattaattcttggcttccttaataatggattgaatttgttaggtgtttcctcctattaccagatgatcgtcaaagcggtggtgattttgctggcggtgctggtagacaacaaaaagcagtaataacgactacaggacatcttgaatatgaacatgaaaaaactggctaccctggtttccgctgttgcgctaagcgccaccgtcagtgcgaatgcgatggcaaaagacaccatcgcgctggtggtctccacgcttaacaacccgttctttgtatcgctgaaagatggcgcgcagaaagaggcggataagcttggctataacctggtggtgctggactcccagaacaacccggcgaaagagctggcgaacgtgcaggacttaaccgttcgcggcaccaaaattctgctgattaacccgaccgactccgacgcagtaggtaatgctgtgaagatggctaaccaggcgaacatcccggttatcactcttgaccgccaggcaacgaaaagtgaagtggtgagccacattgcttctgataacgtactgggtggcaaaatcgccggtgattacatcgcgaagaaagcgggtgaaggtgccaaagttatcgagctgcaaggcattgctggtacatccgcagcccgtgaacgtggcgaaggcttccagcaggccgttgctgctcacaagtttaatgttcttgccagccagcagattttgatcgcactaaaggtttgaacgtaatgcagaacctgttgaccgctcatccggatgttcaggctgtattcgcgcagaatgatgaaatggcgctgggcgcgctgcgcgcactgcaaactgccggtaaatcggatgtgatggtcgtcggatttgacggtacaccggatggcgaaaaagcggtgaatgatggcaaactagcagcgactatcgctcagctacccgatcagattggcgcgaaaggcgtcgaaaccgcagataaagtgctgaaaggcgagaaagttcaggctaagtatccggttgatctgaaactggttgttaagcagtagttttaatcaggttgtatgacctgatggtgacataaatacgtcatcgacagatgaacgtgtaatataaagaaaagcagggcacgcgccaccctaacacggtggcgcattttatggacatcccgaatatgcaaaacgcaggcagcctcgttgttcttggcagcattaatgctgaccacattcttaatcttcaatcttttcctactccaggcgaaaccgtaaccggtaaccactatcaggttgcatttggcggcaaaggcgcgaatcaggctgtggctgctgggcgtagcggtgcgaatatcgcgtttattgcctgtacgggtgatgacagcattggtgagagcgttcgccagcagctcgccactgataacattgatattactccggtcagcgtgatcaaaggcgaatcaacaggtgtggcgctgatttttgttaatggtgaaggtgagaatgtcatcggtattcatgccggcgctaatgctgccctttccccggcgctggtggaagcgcaacgtgagcgtattgccaacgcgtcagcattattaatgcagctggaatcaccactcgaaagtgtgatggcagcggcgaaaatcgcccatcaaaataagactatcgttgcgcttaacccggctccggctcgcgaacttcctgacgaactgctggcgctggtggacattattacgccaaacgaaacggaagcagaaaagctcaccggtattcgtgttgaaaatgatgaagatgcagcgaaggcggcgcaggtactgcatgaaaaaggtatccgtactgtactgattactttaggaagtcgtggtgtatgggctagcgtgaatggtgaaggtcagcgcgttcctggattccgggtgcaggctgtcgataccattgctgccggagatacctttaacggcgcgttaatcacggcgttgctggaagaaaaaccattgccagaggcgattcggtttgcccatgctgccgctgcgattgccgtaacacgtaaaggcgcacaaccttccgtaccgtggcgtgaagagatcgacgcatttttagacaggcagaggtgacgcttggctacaatgaaagatgttgcccgcctggcgggcgtttctacctcaacagtttctcacgttatcaataaagatcgcttcgtcagtgaagcgattaccgccaaagttgaagcggcgattaaagaactcaattacgcgccatcagccctggcgcgtagcctcaaactcaatcaaacacataccattggcatgttgatcactgccagtaccaatcctttctattcagaactggtgcgtggcgttgaacgcagctgcttcgaacgcggttatagtctcgtcctttgcaataccgaaggcgatgaacagcggatgaatcgcaatctggaaacgctgatgcaaaaacgcgttgatggcttgctgttactgtgcaccgaaacgcatcaaccttcgcgtgaaatcatgcaacgttatccgacagtgcctactgtgatgatggactgggctccgttcgatggcgacagcgatcttattcaggataactcgttgttgggcggagacttagcaacgcaatatctgatcgataaaggtcatacccgtatcgcctgtattaccggtccgctggataaaactccggcgcgcctgcggttggaaggttatcgggcggcgatgaaacgtgcgggtctcaacattcctgatggctatgaagtcactggtgattttgaatttaacggcgggtttgacgccatgcgccaactgttatcacatccgctgcgtcctcaggccgtctttaccggaaatgacgctatggctgttggcgtttaccaggcgttatatcaggcagagttacaggttccgcaggatatcgcggtgattggctatgacgatatcgaactggcaagctttatgacgccaccattaaccactatccaccaaccgaaagatgaactgggggagctggcgattgatgtactcatccatcggataacccagccgacccttcagcaacaacgattacaacttactccgattctgatggaacgcggttcggcttagatttacgctgtcttttgatcaaattattaccatcggttgttttcagaagcatgaacattgctgctgaagcaacagtaataatgcccatcgtgataaacgtatagtggaattgttcgacagtcgttgtgccttccatcccttcataaacgcgaaggacggccgcacttacagcaacgcctaaactaatcgacagttgctgcgtgaccgccagaacactgttaccgctgctggcgttgtcatcggtcagatcggcaagtgtgatggtattcatcgcggtaaattgcgtcgacatagccatccctaatataaacaacggcaagatcagcatccatatcgccattgccggtgattgcaaagagaactgagcgatcattagcccaataatcaccgtgatccccactaacgtatggcgatagcccagacgacgtaagacttgggtaaccatcgattttgcaataatggaacctaacgctgtcggtgccatcatacagccggcaataaacgcctgataaccaaatcctacctgtaacatcaatggcataaggaacgatacacaaccggtccccagacgggttgcaatattgcctacgataccgattgagaaagtgcgggttttaaataaatctaatgaaattaatgggtttggcgtgtgtcgcgcatggagaatatagagaagcagtaacccgatgctggtgacaattaccgtcaaggcaatccagctggcgacaatcttttccccgaatagctctattccgcttgagaagagaacaaggctgaggccaaacagcaaaaagccagtgatatcgaatctgcgtcgtgcggtggtgaaattgggcatatgtttgcgcgcgtaaagaaggcccgcaatacctatggggatattgattaaaaatatccagtgccaggttgcccaggtgaccagcacgccgccaagaacggggcctaaaattggccccaccagacccggcatggcgacaaaattcaatactggaagaagttcattacgaggataagcgcgcagtaaggccagccgagcaacaggcatcatcattgcgccgcctatcccctgaataacccggaagacaaccagctgtggtagcgaattagaaagtgcgcaggccagagaacccaatgtgaacagactcacggcaagggtaaaaatgcgacgcgtaccgaagcgatcggctagccatccgcttaccggaataagcatcgccaccgtcagcgtataactgatgatggctgattgcatcgcgagaggagaacgattaaggctatgagcgattgcgggtaaggcggtattcagaatagtggcatcaagtgcctgcatgaagaaggccatcgccgcgatccacggcaaacccgccatactgcgcttctttttatcgctcattcaatgtcttgttatcgggttgtcacttatcaggtgagcgtagcagcgcctgacaagctttaaatgccgcgtcgccatcgctttggacaatcgcatcgacaatcgcctggtgcagatttagctttatcactgtgtcgctggtaattgacgtgaagtaagtgtgataaaccgaatggaatagcgaggcgaatgaggtcaaaaacggattggcgctcatttcatagatatgctcatgccaggccatatcgacttcgatccagcgttcacggcgaaagttctcttttaatgccgccatttcggccattaacgtattgagatgcgccttctgttccgcggtgccaaccgttgctgccagtaggcaggcttgcggctccagacagatacgcataaccagaaagtgatcgatgacctgatgaaagttctcttctgtcatccaccaggtaagcaattcctgatcaagaaaattccagttcgattgtggcatgacccgagtaccaattcgcggtcgcggtaaaaccatcccttttgccgttaacgttttgaccgcttcgcgtaccgctgtacgactcactccaaattgctcgcccagctcaatctcaccaggcaaaatggtaccgggttcatattcaccttttaagatccgttgcgccagcttctcagccagaacatacgaaaggtttttctgtgcagctaactgttgtgcgcttaaaggcattacttatcttcctttttctttttattcctccttagtatgccaccaggaagtgtgattacggttgcaaaaacggcaaattgcttgttttatggtacattaacggggcttttgctgaaaaaatgcgcggtcagaaaattattttaaatttcctcttgtcaggccggaataactccctataatgcgccaccactgacacggaacaacggcaaacacgccgccgggtcagcggggttctcctgagaatctcaacagagaaagcaaaaataaatgcttgactctgtggcgggaaagcgtattatgcacaccccgcgccgctgagaaaaagcgaagcggcactgctctttaacaatttatcagacaatctgtgtgggcactcgaagatacggattcttaacgtcgcaagacgaaaaatgaataccaagtctcaagagtgaacacgtaattcattacgaagtttaattctttgagcatcaaacttttaaattgaagagtttgatcatggctcagattgaacgctggcggcaggcctaacacatgcaagtcgaacggtaacaggaaacagcttgctgtttcgctgacgagtggcggacgggtgagtaatgtctgggaaactgcctgatggagggggataactactggaaacggtagctaataccgcataacgtcgcaagaccaaagagggggaccttcgggcctcttgccatcggatgtgcccagatgggattagctagtaggtggggtaacggctcacctaggcgacgatccctagctggtctgagaggatgaccagccacactggaactgagacacggtccagactcctacgggaggcagcagtggggaatattgcacaatgggcgcaagcctgatgcagccatgccgcgtgtatgaagaaggccttcgggttgtaaagtactttcagcggggaggaagggagtaaagttaatacctttgctcattgacgttacccgcagaagaagcaccggctaactccgtgccagcagccgcggtaatacggagggtgcaagcgttaatcggaattactgggcgtaaagcgcacgcaggcggtttgttaagtcagatgtgaaatccccgggctcaacctgggaactgcatctgatactggcaagcttgagtctcgtagaggggggtagaattccaggtgtagcggtgaaatgcgtagagatctggaggaatatcggtggcgaaggcggccccctggacgaagactgacgctcaggtgcgaaagcgtggggagcaaacaggattagataccctggtagtccacgccgtaaacgatgtcgacttggaggttgtgcccttgaggcgtggcttccggagctaacgcgttaagtcgaccgcctggggagtacggccgcaaggttaaaactcaaatgaattgacgggggcccgcacaagcggtggagcatgtggtttaattcgatgcaacgcgaagaaccttacctggtcttgacatccacggaagttttcagagatgagaatgtgccttcgggaaccgtgagacaggtgctgcatggctgtcgtcagctcgtgttgtgaaatgttgggttaagtcccgcaacgagcgcaacccttatcctttgttgccagcggtccggccgggaactcaaaggagactgccagtgataaactggaggaaggtggggatgacgtcaagtcatcatggcccttacgaccagggctacacacgtgctacaatggcgcatacaaagagaagcgacctcgcgagagcaagcggacctcataaagtgcgtcgtagtccggattggagtctgcaactcgactccatgaagtcggaatcgctagtaatcgtggatcagaatgccacggtgaatacgttcccgggccttgtacacaccgcccgtcacaccatgggagtgggttgcaaaagaagtaggtagcttaaccttcgggagggcgcttaccactttgtgattcatgactggggtgaagtcgtaacaaggtaaccgtaggggaacctgcggttggatcacctccttaccttaaagaagcgtactttgcagtgctcacacagattgtctgatagaaagtgaaaagcaaggcgtcttgcgaagcagactgatacgtccccttcgtctagaggcccaggacaccgccctttcacggcggtaacaggggttcgaatcccctaggggacgccacttgctggtttgtgagtgaaagtcacctgccttaatatctcaaaactcatcttcgggtgatgtttgagatatttgctctttaaaaatctggatcaagctgaaaattgaaacactgaacaacgaaagttgttcgtgagtctctcgaattttcgcaacacgatgatgaatcgaaagaaacatcttcgggttgtgaggttaagcgactaagcgtacacggtggatgccctggcagtcagaggcgatgaaggacgtgctaatctgcgataagcgtcggtaaggtgatatgaaccgttataaccggcgatttccgaatggggaaacccagtgtgtttcgacacactatcattaactgaatccataggttaatgaggcgaaccgggggaactgaaacatctaagtaccccgaggaaaagaaatcaaccgagattcccccagtagcggcgagcgaacggggaggagcccagagcctgaatcagtgtgtgtgttagtggaagcgtctggaaaggcgcgcgatacagggtgacagccccgtacacaaaaatacacatattgtgagctcgatgagtagggcgggacacgtggtatcctgtctgaatatggggggaccatcctccaaggctaaatactcctgactgaccgatagtgaaccagtaccgtgagggaaaggcgaaaagaaccccggcgaggggagtgaaaaagaacctgaaaccgtgtacgtacaagcagtgggagcacgcttaggcgtgtgactgcgtaccttttgtataatgggtcagcgacttatattctgtagcaaggttaaccgaataggggagccgaagggaaaccgagtcttaactgggcgttaagttgcagggtatagacccgaaacccggtgatctagccatgggcaggttgaaggttgggtaacactaactggaggaccgaaccgactaatgttgaaaaattagcggatgacttgtggctgggggtgaaaggccaatcaaaccgggagatagctggttctccccgaaagctatttaggtagcgcctcgtgaattcatctccgggggtagagcactgtttcggcaagggggtcatcccgacttaccaacccgatgcaaactgcgaataccggagaatgttatcacgggagacacacggcgggtgctaacgtccgtcgtgaagagggaaacaacccagaccgccagctaaggtcccaaagtcatggttaagtgggaaacgatgtgggaaggcccagacagccaggatgttggcttagaagcagccatcatttaaagaaagcgtaatagctcactggtcgagtcggcctgcgcggaagatgtaacggggctaaaccatgcaccgaagctgcggcagcgacgcttatgcgttgttgggtaggggagcgttctgtaagcctgcgaaggtgtgctgtgaggcatgctggaggtatcagaagtgcgaatgctgacataagtaacgataaagcgggtgaaaagcccgctcgccggaagaccaagggttcctgtccaacgttaatcggggcagggtgagtcgacccctaaggcgaggccgaaaggcgtagtcgatgggaaacaggttaatattcctgtacttggtgttactgcgaaggggggacggagaaggctatgttggccgggcgacggttgtcccggtttaagcgtgtaggctggttttccaggcaaatccggaaaatcaaggctgaggcgtgatgacgaggcactacggtgctgaagcaacaaatgccctgcttccaggaaaagcctctaagcatcaggtaacatcaaatcgtaccccaaaccgacacaggtggtcaggtagagaataccaaggcgcttgagagaactcgggtgaaggaactaggcaaaatggtgccgtaacttcgggagaaggcacgctgatatgtaggtgaagtcccttgcggatggagctgaaatcagtcgaagataccagctggctgcaactgtttattaaaaacacagcactgtgcaaacacgaaagtggacgtatacggtgtgacgcctgcccggtgccggaaggttaattgatggggtcagcgcaagcgaagctcttgatcgaagccccggtaaacggcggccgtaactataacggtcctaaggtagcgaaattccttgtcgggtaagttccgacctgcacgaatggcgtaatgatggccaggctgtctccacccgagactcagtgaaattgaactcgctgtgaagatgcagtgtacccgcggcaagacggaaagaccccgtgaacctttactatagcttgacactgaacattgagccttgatgtgtaggataggtgggaggctttgaagtgtggacgccagtctgcatggagccggccttgaaataccaccctttaatgtttgatgttctaacgtggacccgtgatccgggttgcggacagtgtctggtgggtagtttgactggggcggtctcctcctaaagagtaacggaggagcacgaaggttggctaatcctggtcggacatcaggaggttagtgcaatggcataagccagcttgactgcgagcgtgacggcgcgagcaggtgcgaaagcaggtcatagtgatccggtggttctgaatggaagggccatcgctcaacggataaaaggtactccggggataacaggctgataccgcccaagagttcatatcgacggcggtgtttggcacctcgatgtcggctcatcacatcctggggctgaagtaggtcccaagggtatggctgttcgccatttaaagtggtacgcgagctgggtttagaacgtcgtgagacagttcggtccctatctgccgtgggcgctggagaactgaggggggctgctcctagtacgagaggaccggagtggacgcatcactggtgttcgggttgtcatgccaatggcactgcccggtagctaaatgcggaagagataagtgctgaaagcatctaagcacgaaacttgccccgagatgagttctccctgaccctttaagggtcctgaaggaacgttgaagacgacgacgttgataggccgggtgtgtaagcgcagcgatgcgttgagctaaccggtactaatgaaccgtgaggcttaaccttacaacgccgaaggtgttttggcggatgagagaagattttcagcctgatacagattaaatcagaacgcagaagcggtctgataaaacagaatttgcctggcggccgtagcgcggtggtcccacctgaccccatgccgaactcagaagtgaaacgccgtagcgccgatggtagtgtggggtctccccatgcgagagtagggaactgccaggcatcaaattaagcagtaagccggtcataaaaccggtggttgtaaaagaattcggtggagcggtagttcagtcggttagaatacctgcctgtcacgcagggggtcgcgggttcgagtcccgtccgttccgccaccctaattaggggcgtagttcaattggtagagcaccggtctccaaaaccgggtgttgggagttcgagtctctccgcccctgccagaaatcatccttagcgaaagctaaggattttttttatctgaaataatcctctccgaagtaaatccttctaccggcatccttgccagccattcagattaatacacttcatccagcacgttaattttcaaaagatcgcgaatcaacgcatttttatcgctattttgcagccatatggcataaagcggccgtgaaagtgttgtgctatcgacaacggtatgcaggccgccttttttacgcgcccagctaacgggtagccaggtgcaaccattaagcatcgcaatctgttgctgtgccagttcagcagaactggttgtcagaatgggaacttcgtcagcaccgatcaaacctgcctcatgctgttgaaaatctggcccccactccagtcgcagatagttaagatctccctttagtttagaaggggcactggtataaagcgctaaagtgaaataccccagcaactgactactaaattcgtccattttgggcgcttcagtggtaataagaagatcaagctggcgttcatgcagctgttttaccagagactgccgttgggcaattcgcgcttcgaactgtaagcctgtatgggcatcctgattttgatacaagcgtcccaaccactgattaagcatacattcccacaacgaggcgctggcaccgatagaaaactcgttatgtcgtgaggtatgcgccacctccttgcgggcggcctgccaggtgctcatgagcgtttctgcataaggcagtagtttttcaccggcagcggttaaacggatattgtttctgtggcgggtgaaaaggttcacacccagttgattttccagttgcctgattcgaaagctcactgctgactgggtcagatagagcgattcagccgctcgaccaaagtgacgcgttcggctaacttccaggaaagtttttaacaattccgtatccacagtgctctccgcaaaattatttgtcgttatgatttaaatgttttgttttacactctgtcaagcgtaactaatactccgcgccataactagctcggtcaaagaattaggagcgtgcaggatggcggaaagctttacgacgactaatcgatatttcgacaataaacattatccacgtggattctctcgtcatggtgatttcaccatcaaagaggcacaactgcttgagcgtcatggttatgccttcaatgagttggatcttggcaaacgcgagccggttaccgaggaagagaaactcttcgtagcagtatgccgtggcgaacgtgagccagtgacagaagcagaacgcgtgtggtccaagtatatgacgcgtattaagcgtccaaaacgttttcacaccctttccggcggtaaaccgcaggttgaaggtgctgaagactacaccgattctgatgattaataaaaagggcgaaatgccctttttttatgtcagtagtttttgcagatggatgagcaaacggtcaatcgcacgatagctaactgcctcctgcaaatgctgacgtgtgataatgtcagactgatcaatatcagcaatggttcgtgcaactttcaataaccgctgccaggcacgaatcgataaccccagatggatcagtgttccttccaaccacatcgcatcttcgctctcaagtttgcagaattggcgtatttccggactatccagccaggcattcagtttattctgccgcttaaattggcgctctctggcggccattacgcgttgtttaacggtggcgctgctttctcccggcactaccgttttactcaaaatgccggggggtggtaatgggatctccagtgagagatcgaagcggtgtcaacgccacgatgtttgaccgttatttgccattttcatgcccgctaaatactttcgttactgatgctgtccgctttccaccatttcatcatcactgattggcgttgtgtttttggtcagcactccagctttacgtttctcttttaaccggtaactctctcctttgatattcagcgtggttgagtgatgtagcagccgatccaggatcgctgttgccagtacgtgatctccgaacatttctccccagtctgcgaaccctttgtttgacgtcagtatgatgctcgctttttcatatcgacggttcagtagccggaagaacagactggcttcctctctgttcatcggcagatagcctatttcatccaggatcaacacccgggcataactcagttgctgtagctgacgctccagccggttttcctgtttcgctttcatcagtgtcgcgatcagtctgtccagtggcataaacagtacccgatgtcccgcatccaccgctttcacgccaagagctatggccagatgagtttttccgacaccaggagggcccagcaggatcacgttttcgctgcgctccacgaacgccagaccagccagttcccggacaaccttacggtcgatgcccggctggaaggtaaagtcgaactgctccagcgttttgacccacggcagacgagcctgcttcagcctggactccataccgcgctgatgcctgccgttccattcctgctgtagcgccatgcacaggaactcccggtagttcagctcttttttagctgcctgttccagcaggctttcaacgtgataactcagatgctccattttcaggcgactcagcaggacttccagttcatgcatcacaacagctcctcataggcactcagtggtcgatgttccacctgactgacctgctgccagagcggggcgtgatgctccggcactgtctgccagccagacgatgctgaacagaggcgatgtgaggccaccagtttctcattactgtagatccgcaactcgtcatccagcgatattcgtatcgataccggctgaccacacagcgcttcgggaacgctgtaacgattaccaccaacctcgatatagctgtcccaggacacatggcggatatcgaagtaactggtatcgaagtctgtatccggtaacggctgcagatgttcctgctccagcgcgaagcgctgttccggcgtttctttgaactggcgaagctcccgtttgtcagccacatcggctatccattgctccagttgttgattgacatgagtgaagctgtcgaacctgcggtaccggacgaagaagttctccttgaggtatttcaccatccgctcaaccttaccttttgttctggccctgcgtggacggcatgcccgtggcaggaagttatagtggtcagccagcaacaggaatccggagttgaacacgactttcccgttgttattcttcagcaccgcagccttctggttatcaaccagcaccgttttcacacaaccaccgaagtagcggaaggcgcgaaccagtgattcgtaggtatgctcagcatcctgttttggtgcggcgaagacatggaagctgcgggagaaccccagcgtattaaccgcaaagttaactttgcaccgttgcccggcaacctccacctcaacttcgccccagtcatgctggagctggtatccaggctgagtttcgaagcgaactgttctttttgacggacgcattttacgtttgggctggatgtagtaacgcagcatggaacgtccgcccgtataacccattgccttaatctccgcgaagataacctcgctattccagacattctctgccaggcgcatgtcgatgtaatccataaacggtttcagcttaaccattttgtggcgggtctttctggctggcggttcagggtatttgaggtagcgtctgaccgtccgttcagagcaaccaatctgagtcgcaatatcgacgatgtacgcgccctgctggcgcatttgctttatcatgtaaaagtcctctctgctcagcatgttgatgtcctttctggtgtgagaaccttaaggaaacaacatgttgggtggagcggacaatccaaatggcgaattaccgtcttatatcactggcgctgacagcggtcgagaaagggccccgagagccggttgagataacgtaatgtctgttctggcgtgcagcggttatggtttccctgataatgtccggtagggctgggattcatcgccgcaacaagctggaaacgggctggataggttatttttgctcgtgtgcgtgaaagatggatctgcccggattcaatcggctctcgcaaggcatccagtgtacgccgttcaaattcaggtagctcatcaagaaaaagcacgccgggtgatgctgccaacttactgatttagtgtatgatggtgtttttgaggtgctccagtggcttctgtttctatcagctgtccctcctgttcagctactgacggggtggtgcgtaacggcaaaagcactgccggacatcagcgctatctctgctctcactgccgtaaaacatggcaaatgcagttcacttacaccgcttctcaacccggtacgcaccagaaaatcattgatatggccatgaatggcgttggatgccgggcaactgcacgcattatgggcgttggcctcaacacgattttacgtcacttaaaaaactcaggccgcagtcggtaacctcgcgcatacagccgggcagtgacgtcatcgtctgcgcggaaatggacgaacagtggggctatgtcggggctaaatcgcgccagcgctggctgttttacgcgtatgacagtctccggaagacggttgttgcgcacgtattcggtgaacgcactatggcgacgctggggcgtcttatgagcctgctgtcaccctttgacgtggtgatatggatgacggatggctggccgctgtatgaatcccgcctgaagggaaagctgcacgtaatcagcaagcgatatacgcagcgaattgagcggcataacctgaatttgaggcagcacctggcacggctgggacggaagtcgctgtcgttctcaaaatcggtggagctgcatgacaaagtcatcgggcattatctgaacataaaacactatcaataagttggagtcattaccagcacgccgttatgcgccaacgaaatttcacctggccctggaattgcaccaccgcccaccatcgcagttaacgacgcactgtgatgaggtgagcggaacgggcgctgccgccattgtttttgtactgattcagcatttaccagacttaatatcgcagcgctctccagtgcctcttcattgcttaaatctggcaacaggccattaatacggctggcgagcattgttttacctgttcccggcggcccaatcagtaaaaggttgtgcctgccagcggcggtaatttccagtcctcgctttccttgttcctgaccgacaacatcactgagatcatgttgtagcgcccgggatactgcatcagttggtttcgggcgttcgagagcgtgcttaccttccagaaacgcacagacagcttgcagatgatcggctatcaggcatccttcaccgttaattagccccacttcatcttcgttatctttcgcgacgataatttttctgcccgacttaatagcttcagttgcactggagattgcaccgggaacgccacgcagagcgcctgtaagagccagttctccgactaattcatattcatctaacttattggctgtaagctgttctgaggccgccagcaacgcaatggcgataggtaaatcatatcgtcccccttcttttggcagatcggctggagcaaggttgatggtgatttttttcgccggatattcatatccgctattgataatggcgctgcgcacgcgatcgcgagcttcttttacagttgtttctggtaagcccaccatcgttaagccgggtagacctttactgatatgtacctcaacagtgatcgggggcgcatttactcccagggctgcgcgggtatgaacaattgacagtgacataagccctccttgagtcaccattatgtgcataagatatcgctgctgtagcccgctaattcgtgaattttagtggctgattcctgtttatttgtgcaagtgaagttgagttgttctggcggtggaatgatgctcgcaaaaatgcagcggacaaaggatgaactacgaggaagggaacaacatttatactgaaattgaatttttttcactcactattttctttttaaaaaacaacaacttctattgaaattattaaagctatcataaaaataggcccaaaaatatcttgtgctattcgcaaaatctatggtaactctttaggcattccttcgaacaagatgcaagaaaagacaaaatgacagcccttctacgagtgattagcctagtcgtgattagcgtggtggtgattattatcccaccgtgcggggctgcacttggacgaggaaaggcttagagatcaagccttaacgaactaagacccccgcaccgaaaggtccgggggttttttttgaccttaaaaacataaccgaggagcagacaatgaataacagcacaaaattctgtttctcaagattcaggacggggaactaactatgaatggcgcacagtgggtggtacatgcgttgcgggcacagggtgtgaacaccgttttcggttatccgggtggcgcaattatgccggtttacgatgcattgtatgacggcggcgtggagcacttgctatgccgacatgagcagggtgcggcaatggcggctatcggttatgcccgtgctaccggcaaaactggcgtatgtatcgccacgtctggtccgggcgcaaccaacctgataaccgggcttgcggacgcactgttagattccatccctgttgttgccatcaccggtcaagtgtccgcaccgtttatcggcactgacgcatttcaggaagtggatgtcctaggattgtcgttagcctgtaccaagcacagctttctggtgcagtcgctggaagagttgccgcgcatcatggctgaagcattcgacgttgcctgctcaggtcgtcctggtccggttctggtcgatatcccaaaagatatccagttagccagcggtgacctggaaccgtggttcaccaccgttgaaaacgaagtgactttcccacatgccgaagttgagcaagcgcgccagatgctggcaaaagcgcaaaaaccgatgctgtacgttggcggtggcgtgggtatggcgcaggcagttccggctttgcgtgaatttctcgctgccacaaaaatgcctgccacctgtacgctgaaagggctgggcgcagtagaagcagattatccgtactatctgggcatgctggggatgcacggcatcaaagcggcaaacttcgcggtgcaggagtgtgacctgctgatcgccgtgggcgcacgttttgatgaccgggtgaccggcaaactgaatactttcgcaccacacgccagtgttatccatatggatatcgacccggcagaaatgaacaagctgcgtcaggcacatgtggcattacagggtgatttaaatgctctgttaccagcattacagcagccgttaaatatcaatgactggcagcaatactgcgcgcagctgcgtgatgaacattcctggcgttacgaccatcccggtgacgctatctacgcgccgttgttgttaaaacaactgtcggatcgtaaacctgcggattgcgtcgtgaccacagatgtggggcagcaccagatgtgggctgcgcagcacatcgcccacactcgcccggaaaatttcatcacctccagcggcttaggtaccatgggttttggtttaccggcggcggttggcgcacaagtcgcgcgaccgaacgataccgttgtctgtatctccggtgacggctctttcatgatgaatgtgcaagagctgggcaccgtaaaacgcaagcagttaccgttgaaaatcgtcttactcgataaccaacggttagggatggttcgacaatggcagcaactgttttttcaggaacgatacagcgaaaccacccttactgataaccccgatttcctcatgttagccagcgccttcggcatccctggccaacacatcacccgtaaagaccaggttgaagcggcactcgacaccatgctgaacagtgatgggccatacctgcttcatgtctcaatcgacgaacttgagaacgtctggccgctggtgccgcctggcgccagtaattcagaaatgttggagaaattatcatgatgcaacatcaggtcaatgtatcggctcgcttcaatccagaaaccttagaacgtgttttacgcgtggtgcgtcatcgtggtttccacgtctgctcaatgaatatggccgccgccagcgatgcacaaaatataaatatcgaattgaccgttgccagcccacggtcggtcgacttactgtttagtcagttaaataaactggtggacgtcgcacacgttgccatctgccagagcacaaccacatcacaacaaatccgcgcctgagcgcaaaaggaatataaaaatgaccacgaagaaagctgattacatttggttcaatggggagatggttcgctgggaagacgcgaaggtgcatgtgatgtcgcacgcgctgcactatggcacttcggtttttgaaggcatccgttgctacgactcgcacaaaggaccggttgtattccgccatcgtgagcatatgcagcgtctgcatgactccgccaaaatctatcgcttcccggtttcgcagagcattgatgagctgatggaagcttgtcgtgacgtgatccgcaaaaataatctcaccagcgcctatatccgtccgctgatcttcgtcggtgatgttggcatgggagtaaacccgccagcgggatactcaaccgacgtgattatcgctgctttcccgtggggagcgtatctgggcgcagaagcgctggagcaggggatcgatgcgatggtttcctcctggaaccgcgcagcaccaaacaccatcccgacggcggcaaaagccggtggtaactacctctcttccctgctggtgggtagcgaagcgcgccgccacggttatcaggaaggtatcgcgctggatgtgaacggttacatctctgaaggcgcaggtgaaaacctgtttgaagtgaaagacggcgtgctgttcaccccaccgtttacctcatccgcgctgccgggtattacccgtgatgccatcatcaaactggcgaaagagctgggaattgaagtgcgtgagcaggtgctgtcgcgcgaatccctgtacctggcggatgaagtgtttatgtccggtacggcggcagaaatcacgccagtgcgcagtgtagacggtattcaggtgggtgaaggccgttgcggcccggttaccaaatgcattcagcaagccttcttcggcctcttcactggcgaaaccgaagataaatggggctggttagatcaagttaatcaataaatacaaaaaatgggacggcacttaccgtcccatttacgagacagacactgggagtaaataaagtatgcctaagtaccgttccgccaccaccactcatggtcgtaatatggcgggtgctcgtgcgctgtggcgcgccaccggaatgaccgatgccgattttggcaagccgattatcgcggttgtgaactcgttcacccaatttgtaccgggtcacgtccatctgcgcgatctcggtaaactggtcgccgaacaaattgaagcggctggcggcgttgccaaagagttcaacaccattgcggtggatgatgggattgctatgggccacggggggatgctttattcactgccatctcgcgaactgatcgctgattccgttgagtatatggtcaacgcccactgcgccgacgccatggtctgcatctctaactgcgacaaaatcaccccggggatgctgatggcttccctgcgcctgaatattccggtgatctttgtttccggcggcccgatggaagccgggaaaaccaaactgtccgagcagatcatcaagctcgatctggttgatgcgatgatccagggcgcagacccgaaagtttctgactcccagagcgatcaggttgaacgttccgcctgcccaacctgcggttcctgctccgggatgtttaccgctaactcaatgaactgcctgaccgaagcgctgggtttgtcgcagccaggcaacggctcgctgctggcaacccacgcggaccgtaagcagttgttcctcaatgccggtaaacgcattgttgaattgaccaaacgttactacgagcaaaacgacgaaagtgcactgccgcgcaatattgctagcaaagcggcgtttgaaaatgccatgacgctggatatcgcgatgggcggctctaccaacacggtacttcacctgctggcggcggcgcaggaagcggaaatcgacttcaccatgagtgatatcgacaaactttcgcgtaaagtcccgcagttatgcaaagttgcgccgagcacccaaaaataccatatggaagatgttcaccgtgctggtggtgttatcggtattctcggtgaactggatcgcgcggggttactgaaccgtgatgtgaaaaacgtacttggcctgacgttgccgcaaactctggaacaatacgacgttatgctgacccaggatgacgcggtaaaaaatatgttccgcgcaggccctgcgggcattcgtactacacaggcattctcgcaggattgccgttgggattctctcgatgacgatcgcgcaaacggctgtatccgctcgctggaacacgcctacagcaaagacggcggcctggcggtgctctacggtaattttgctgaaaacggctgcatcgtgaaaacagcgggcgtcgatgacagcatcctcaaattcaccggcccggcgaaagtgtacgaaagccaggacgacgcggtagaagcgatcctcggtggcaaagttgtcgcgggcgatgtggtggtgatccgctatgaaggcccgaaaggcggccctggcatgcaggaaatgctctacccaaccagcttcctgaaatcaatgggtctcggtaaagcctgtgcgctgatcaccgacggtcgtttctctggcggcacctctggtctttccatcggccacgtctcaccggaagcggcaagcggcggcagcattggtctgattgaagatggtgacctgatcgctatcgacatcccgaaccgtggcattcagttacaggtaagcgatgccgaactggcggcgcgtcgtgaagcgcaggaagctcggggtgacaaagcctggacgccgaaaaaccgtgaacgtcaggtttcctttgccctgcgcgcctacgccagcctggcaaccagcgccgacaaaggtgcggtgcgcgataaatcgaaactggggggttaataatggctgactcgcaacccctgtccggtgctccggaaggtgccgaatatttaagagcagtgctgcgcgcgccggtttacgaggcggcgcaggttacgccgctacaaaaaatggaaaaactgtcgtcgcgtcttgataacgtcattctggtgaagcgcgaagatcgccagccagtgcacagctttaagctgcgcggcgcatacgccatgatggcgggcctgacggaagaacaaaaagcgcacggcgtgatcactgcttctgcgggtaaccacgcgcagggcgtcgcgttttcttctgcgcggttaggcgtgaaggccctgatcgttatgccaaccgccaccgccgacatcaaagtcgatgcggtacgtggattcggcggcgaagtgctgcttcatggcgcgaactttgacgaagcgaaagctaaagcgatcgaactgtcacagcagcaggggttcacctgggtgccgccgttcgaccatccgatggtgattgccgggcaaggcacgctggcgctggaactgctccagcaggacgcccatctcgaccgcgtatttgtgccagtcggcggcggcggtctggcggcgggcgttgcggtgctgatcaaacaactgatgccacaaatcaaagtgatcgccgtagaagcggaagactccgcctgcctgaaagcagcgctggatgcgggtcatccggttgatctgccgcgcgtgggactgttcgccgaaggtgtcgcggtaaaacgcatcggcgacgaaaccttccgtttatgccaggagtatctcgacgacatcatcaccgtcgatagtgatgcgatctgtgcggcgatgaaggatttattcgaagatgtgcgcgcagtggcggaaccctctggcgcgttggcgctggcgggaatgaaaaaatatatcgctcagcacaacattcgcggcgaacgcctggcgcatattctttccggtgccaacgtgaacttccacggcctgcgctacgtctcggaacgctgcgaactgggcgaacagcgtgaagcgttgttggcggtgaccattccggaagaaaaaggcagcttcctcaaattctgccaactgcttggcgggcgatcggtcaccgagttcaactaccgttttgccgatgccaaaaacgcctgcatctttgtcggcgtgcgcctgagccgcggcctcgaagagcgcaaagaaattttgcagatgctcaacgacggcggctacagcgtggtggatctctccgacgacgaaatggcgaagttgcatgtgcgctatatggtcggcgggcgtccgtcacatccgttgcaggaacgcctctacagcttcgaattcccggaatcaccgggcgcgctgctgcgcttcctcaacacgctgggtacgcactggaacatttctttgttccactatcgcagccatggcaccgactacgggcgcgtactggcggcgttcgaactcggcgaccatgaaccggatttcgaaacccggctaaatgagctgggctacgattgccacgacgaaaccaataatccggcgttcaggttctttttggcgggttagggaaaaatgcctgatagcgcttcgcttatcaggcctacccgcgcgacaacgtcatttgtggttcggcaaaatcctccagaacgcctcaatcagcggctcatgcagccgctttttttgtgcacacacgcccagttcaaacggcgttttctcatcgctgcgatctaaaatcattacccggttgcgtacaggctccgggctgttttccagcaccacttccggcaacagcgccacaccacagccgagcgccaccatcgataccatcgcttcatgcccgccaaccgtggcgtaaatcatcgggttgctgattttattgcgtcgaaaccacagttcaatgcggcggcgtaccggcccctgatcggccataataaacggcaccgttgaccagtcgggcttttcgacagatacctgattacgcaccgggcagggcagcgcgggggcaatcagcactactgccagattctccagcatcgaaaacgccacagcgccgggtagcgtctccggtttcccggcaatcgccagatccgcttctcccgtgaccactttttccattgcatctgccgcatcaccagtggtgagtttgatctccaccgacgggtgttccgcgcggaagcgatccagaatcggcggcagatggctgtaggcagcggtcaccgagcagaagatatgtaattcgccagagagcgacggcccttgctgatcgatggtgtggcgcaattgctgatactgcaacagcgtttgctgggcgaaaacgcgcagctcttcgcccgcttccgtcagcgttaccgtgcggttatcgcgcacaaatagcggctgaccaagatcttcttccaggcgctgaatctgccgtgagagcgtggatgggctaacgtgcatcgcccgcgcgctgcggccaaaatggcggctttccgccagatgcaggaaggttttcagatcgcgtaaatccaatggcgcagccctcgatgttgacgttgcagaaattgcaatgtgacgttgtgaatatatcaatttccgcaataaatttcctgtcatatagtgaattcaatctcgcaaacgcgaaccgaacaataagaagcacaacatcacgaggaatcaccatggctaactacttcaatacactgaacctgcgccagcagctggcacagctgggcaaatgtcgctttatggggcgcgacgaattcgccgacggcgcgagctaccttcagggtaaaaaagtggttatcgtcggctgtggcgcacaggggctgaaccagggcctgaacatgcgtgattctggtctcgatatctcctacgctctgcgtaaagaagcgattgccgagaagcgcgcgtcctggcgtaaagcgaccgaaaacggttttaaagttggtacttacgaagaactgatcccgcaggcggatctggtggttaacctgacgccagacaagcagcactctgatgtagtgcgcaccgtacagccactgatgaaagacggcgcggcgctgggttactcgcacggtttcaacatcgtcgaagtgggcgagcagatccgtaaagacattaccgtagtcatggttgcgccgaaatgccctggcaccgaagtacgtgaagagtacaaacgtggattcggcgtaccgacgctgattgccgttcacccggaaaacgatccgaaaggcgaaggcatggcgatcgctaaagcatgggcggcagcaaccggtggtcaccgtgcgggcgtgctggaatcgtccttcgttgcggaagtgaaatctgacctgatgggtgagcaaaccatcctgtgcggtatgttgcaggctggctctctgctgtgcttcgacaagctggtggaagagggcaccgatccggcatacgcagaaaaactaattcagttcggttgggaaaccatcaccgaagcgctgaagcagggcggcatcaccctgatgatggaccgtctctctaacccggcgaaactgcgtgcttacgcgctgtctgaacagctgaaagagatcatggcacccctgttccagaaacatatggacgacatcatctccggcgaattctcctccggtatgatggcggactgggccaacgatgataagaaactgctgacctggcgtgaagagaccggcaaaaccgccttcgaaaccgcgccgcagtatgaaggcaaaatcggcgagcaggagtacttcgataaaggcgtactgatgatcgcgatggtgaaagcgggcgttgagctggcgtttgaaaccatggttgattccggcatcatcgaagaatctgcttactatgaatcactgcacgaactgccgctgattgccaacaccatcgcccgtaagcgtctgtacgaaatgaacgtggttatctctgataccgccgagtacggtaactatctgttctcttacgcttgtgtgccgctgctgaaaccgtttatggcagagctgcaaccgggcgatctgggtaaagctattccggaaggtgcggtagataacgcgcaactgcgtgatgtgaacgaagcgattcgctgccatgcgattgagcaggtaggtaagaaactgcgcggctatatgacggatatgaaacgtattgcagttgcgggttaagtgcgcgctgatgccctcaccccgaccctctcccacagggagagggagaaaacactcaaggccttctcctggagaaggccttgctattagttacggtacagcaccttaatgatgtggtaaccgaactgggtgtgcagcgggccggttggctccagtaccggacaagagaacacaactttatcaaacgccggaaccatctgaccctggcggaattcacctaaatcaccgccgcgtttgcctgatgggcaaatggagtgtttcttcgccagcttgccgaaatcggcaccgttcttaatctgctcgagaagatccagagccagtttctcttcttttacaaggatatgcagtgctgctgctgtttttgccatgatcgtgccttgagtgaataattgtcaggcggcgattttagcatgatccgcagatgctaacgtaattgttagtcagggaggggctggtacatatatggcaaaagcccggaaaatccgggcttcgcaggtccctcaaggggagaaaacttagggcctctatgggctacaaagtcattatcggggatggttattttattgtcaatttatgagcgatatggcattgattgacttgatgaccgccctctgtatgtctgcaaccaactcatgtggcaaacattgattaagataccctctgtaagtccttgctctgtttaatcggtttcgactgacttgttgtactaggtcggctttggcccaacgaatctgctgatcaaagaattgcaggtcattgataacattactggctatttcaacatgcattccacgatttaacttgtcatgatcgcgagtggttgataatggaacgacgatacatgcgttgccattaatttttccgttgagcacgacaactggatttgcccctatatttccagacatctgttatcacttaacccattacaagcccgctgccgcagatattcccgtggcgagcgataacccagcgcactatgcggatgccattcgttataatgctcgaacgcctctgcaaggttctttgctgccgttaacccgtctggtttgggcatgatactgatgtagtcacgctttatcgttttcacgaagctctctgctattccgttactctccggactccgcaccgccgtgttcttcggttcaagtcccaacatccgggcgaactggcgtgtttcattagcccggtagcatgaaccattatccgtcagccactccactggagacgacggaagatcgttgccgaagcggcgttccaccgctcccagcatgacgtcctgtactgtttcactgttgaagccgccggtagtcaccgcccagtgcagtgcctcacgatcacagcagtccagcgcgaacgtgacacgcagtctctctccgttatcacagcagaactcgaacccgtcagagcaccatcgctgattgctttctttcacggccactctgcctgtatgtgcccgtttcgatggcggtacagcaggttttcgctcaagcaacagcgcattctggcgcatgatccggtaaacacgtttggcattgatcgcaggcataccatcaagttctgcctgtctgcgaagcagcgcccatacccgacgataaccatacgtgggcagctctccgataacatggtgtatacggagaagcacatccgtatcatcagtgtgacgactgcggcggccatccatccagtcatcggttcgtctgagaatgacgtgcaactgcgcacgcgacacccggagacaacggctgactaagcttactccccatccccgggcaataagggcgcgtgcgctatccacttttttgcccgtccatattcaacggcttctttgaggagttcattttccatcgttttcttgccgagcaggcgctggagttctttaatctgcttcatggcggcagcaagttcagaggcaggaacaacctgttctccggcggcgacagcagtaagacttccttcctggtattgcttacgccagagaaataactggctggttgctacaccatgttgccgggcaacgagggagaccgtcatccccggttcaaagctctgctgaacaattgcgatcttttcctgtgtggtacgccgtctgcgtttctccggccctaagacatcaatcatctgtactccaatgactagtctaaaaactagtattaagactatcacttatttaagtgatactggttgtctggagattcagggggccagtctaacaactaacctgttttttatcatttcaggaggaatgcggccatcgtaatacgtggtgctgaactgtccattctggctaacaggatagttaccaaagttgcaatccagtatttcaccaaccttaggactgaaattaatcgccacgagtacacctctccttagtaaactctgaaaaagtaataacacaacgttacgacccgatattttctaagtctaatggattcacgatgaactccggtttcggtcttccctctctgatttaaacatccgcagccaatcggttagcggcttacacgcggtcacattcaaatgcgattctgctacaatcctccccccgttcgaagattgagcaatacacctatgcgtctaaaccccggccaacaacaagctgtcgaattcgttaccggcccctgcctggtgctggcgggcgcgggttccggtaaaactcgtgtgatcaccaataaaatcgcccatctgatccgcggttgcggttatcaggcgcgacatatcgcggcggtgacctttaccaataaggcggcgcgcgagatgaaagagcgtgtcggacagacgctgggtcgcaaagaggcgcgtgggctgatgatctcaaccttccacacgctggggctggatatcatcaagcgtgagtatgcggcgctggggatgaaggcgaacttttcgctgtttgacgataccgatcagctggcgttgctcaaagagttgaccgaagggctgattgaagatgacaaagttctcctgcaacagttgatttcgaccatctctaactggaagaacgatctcaaaacaccgtcccaggcggcagccagtgcgattggcgagcgggaccgtatttttgcccattgttatgggctgtatgatgcacacctgaaagcgtgcaatgttctcgacttcgatgatctgattttattgccgacgttgctgctgcaacgcaatgaagaagtccgcgagcgctggcagaacaaaattcgctatctgctggtggatgagtatcaggacaccaacaccagccagtatgaactggtgaaactgctggtgggcagccgcgcgcgctttaccgtggtgggcgatgacgaccagtcgatctactcctggcgcggcgcacgtccacaaaacctggtgctgctgagtcaggattttccggcgctgaaggtgattaagcttgagcagaactaccgctcttccggacgtattttgaaagcggcgaacatcctgatcgccaataacccgcacgtctttgagaagcgtctgttctccgaactgggttacggcacagagcttaaagttttaagcgcgaataacgaagaacatgaagccgagcgcgtcactggtgaactgattgcgcatcacttcgtcaataaaacgcagtacaaagattacgctattctttatcgcggtaaccatcagtcgcgagtgtttgaaaaattcctgatgcaaaaccgcatcccgtacaaaatttctggtggtacgtcgtttttctctcgtcctgaaatcaaggacttgctggcttatctgcgcgtgctgactaacccggacgatgacagcgcatttctgcgtatcgttaacacgccgaagagagagattggcccggcgacgctgaaaaagctgggtgagtgggcgatgacgcgcaataaaagcatgtttaccgccagctttgatatgggcctgagtcagacgcttagcggacgtggttatgaagcattgacccgctttactcactggttggcagaaatccagcgtctggcggagcgggagccgattgccgcggtgcgcgatctgatccacggcatggattatgaatcctggctgtacgaaacatcgcccagcccgaaagccgccgaaatgcgcatgaagaacgtcaaccaactgtttagctggatgacggagatgctggaaggcagcgaactggatgagccgatgacgctcacccaggtggtgacgcgctttactttgcgcgacatgatggagcgtggtgagagtgaagaagagctggatcaggtgcaactgatgactctgcacgcgtcaaaagggctggagtttccttatgtctacatggtcggtatggaagaagggtttttgccgcaccagagcagcatcgatgaagataatatcgatgaggagcggcggctggcctatgtcggcattacccgcgcccagaaggaattgacctttacgctgtgtaaagaacgccgtcagtacggcgagctggtgcgcccggagccgagccgctttttgctggagctgccgcaggatgatctgatttgggaacaggagcgcaaagtggtcagcgccgaagaacggatgcagaaagggcaaagccatctggcgaatctgaaagcgatgatggcggcaaaacgagggaaataatcaaggccggaaaagatgcgtcagcatcgcatccggcacttactcattaatgcacttccagcggccagtggacatagctctgccactggctttcctgagcaataatctctttacccagcggatgttgggttagccaaccttgcggaagcgtcaaggtcaacagttcatggttagcctgtaatgtcatctctggcacgagatcgtcacggcgacggctggcaaaaatgatggccaggcggagtaaacggcagagttgttctgcgacgcgcggcggtacggcattttgctgatgcagcgatgagagatcgaccggattagtctggttgagcagtagcgtcgccagcaattttttctgtgcgggggtaaaaccgggaagatccagattacgcaccagataagcagcgtgttgcggcgcttgtttaaagtcaacgctcaggccgatttcatgaagctgacaggcgctgatgagcaaatcgcggcttattgcttcaagatgccattccttttccacctgatcgaagaagttagccgcaactttggctacgcgctgcgcctgatcaatatcgatcataaagcggcgctgaatattacgcagcgtacggctgcgaatatcctgctcgacggccagatgcaacatgccgtagaccaggccttcacgcagcgcaccgcccgccagggtcatacactgaatattcagttcggtaaaaatggcgatcaggatcgccagaccactcgggaacactaacgcacgttccagcgtcagcccgtcaatctccagttcctccagccgaccgcaatgaatggctcgctgtttcaattgctgcaacttttccagggtaatgcgttcatccatcccctgtgccatcatgatttcctgtaacgcctgcacggtgccggaagcaccaacgcacactttccagccgtgataccgtaattcatcggcaaccggacgtaacacttcgcgtgccgctttttctgcagcatcaaaattttcctgccccagattacgatcggcaaaatagcgttccagccaggtgacgcagcccatcgacaggctgaacaacgaggtggtttgtgcacccgtgccggttaccagttcagtactggcaccgcctatatccaccaccaggcgctgatcggcaccgccagttgtgtgagcaacgccctgataaatcagacgtgcttcctcttcaccgctgatcacctgtaccggacaaccgaggatttcctgcgcattggcaataaaatcacccgcattgacggcaagacgtaatgtcgccgtagcgacaacgcgaatttgcgagggagggatatcttgcagacgttcagcaaacaggcgcagacattgccaaccgcgctccattgcttcattagacagggcattttcgctattcaggccagcagccagacgcactttgcgttttattcgcgtcagcgtctggatgcttccagccacctcgcgcacaaccagcatatgaaaactattcgaaccgagatcaatggctgcatacagcgacgaggtggaacccatactcttcatccttcaatctgtctctgtgttggctgcattctttcacctgaatcacttactacagtatgctcatcgggattcattctcttgccatcttgatacagtttgaatgattttgagtatgacattttatttaacctgaacgacgacgattacgcggagcgccagtacgacgcggaccattgcctgtacgtgggcgcgtgaggcgcagcggttttggcagatcggtcatcaatgcgtccggattgtatttgcttaccggaattgagtgaccaatataggtttcaatagcaggcaaattcaatgcatactcttcacacgccaggctgatagagtgaccgcttgcgcctgcgcgacctgtacgaccaatacggtgaacgtaatcttcacagtcatcgggtaaatcgtagttaaagacgtgcgtcactgccggaatatgcaaaccacgcgcggcaacgtcggtggcaaccagaatatccagatcgccacgggtaaattcatcaagaatacgcagacgttttttctgcgcgacatcgcctgtcaacaaaccgacacgatgaccatctgccgccaggtggccccagatctcttcacaacggtgtttggtattggcgaaaataatcgctctgtctggccactcttcttcgatcagcgtttgcagcaaacgcattttttcttcgttagaagggtagaaaagctcttctttaatacggtggcccgttttctgttccggttccacttcaatatattcggcattgttcatctgctcgaacgccagttcacgtacccggtacgaaagcgtggcggagaacagcatgttgaggcgctggtttgcaggcggcatacggcggaacagccagcggatatctttaataaagcccagatcgtacatgcgatcggcttcatccagaaccactacctgaatggcaccgaggttaatgtggttctgcttggcgtagtcaattaaacgacccgtggtgccaatcagaatgtcaacgccgctttccagcactttcagctgtttgtcgtagccatcaccaccgtaagccagacccagcttcaggccagtagcttccgccagcggttctgcgtcggcatggatctgcacggcaagttcacgcgtcggtgccataattaaggcacgcggttgattcaccttgcgatcggcaatcgcaggatgagagagaagataatgaaacgttgacgtaagaaacgccatcgttttcccggtaccggtttgcgcctgcccggctacgtcacgacccgccagcgtcagcggaagggccagtgcctgaatgggcgtacagttatgaaacccttttttttcaagggcttctacaaccttcggatgcagggcgaagtcggaaaacttctgttctgttaaatgtgttttgctcatagtgtggtagaatatcagcttactattgctttacgaaagcgtatccggtgaaataaagtcaacctttagttggttaatgttacaccaacaacgaaaccaacacgccaggcttattcctgtggagttatatatgagcgataaaattattcacctgactgacgacagttttgacacggatgtactcaaagcggacggggcgatcctcgtcgatttctgggcagagtggtgcggtccgtgcaaaatgatcgccccgattctggatgaaatcgctgacgaatatcagggcaaactgaccgttgcaaaactgaacatcgatcaaaaccctggcactgcgccgaaatatggcatccgtggtatcccgactctgctgctgttcaaaaacggtgaagtggcggcaaccaaagtgggcgcactgtctaaaggtcagttgaaagagttcctcgacgctaacctggcgtaagggaatttcatgttcgggtgccccgtcgctaaaaactggacgcccggcgtgagtcatgctaacttagtgttgacttcgtattaaacataccttattaagtttgaatcttgtaatttccaacgcttcccgttttatcttaaatgcgaagtgaacagatttctggctcgtcactcaatccgtcttgtcgtttcagttctgcgtactctcctgtgaccaggcagcgaaaagacatgagtcgatgaccgtaaacaggcatggatgatcctgccataccattcacaacattaagttcgagatttaccccaagtttaagaactcacaccactatgaatcttaccgaattaaagaatacgccggtttctgagctgatcactctcggcgaaaatatggggctggaaaacctggctcgcatgcgtaagcaggacattatttttgccatcctgaagcagcacgcaaagagtggcgaagatatctttggtgatggcgtactggagatattgcaggatggatttggtttcctccgttccgcagacagctcctacctcgccggtcctgatgacatctacgtttcccctagccaaatccgccgtttcaacctccgcactggtgataccatctctggtaagattcgcccgccgaaagaaggtgaacgctattttgcgctgctgaaagttaacgaagttaacttcgacaaacctgaaaacgcccgcaacaaaatcctctttgagaacttaaccccgctgcacgcaaattctcgtctgcgtatggaacgtggtaacggttctactgaagatttaactgctcgcgtactggatctggcatcacctatcggtcgtggtcagcgtggtctgattgtggcaccgccgaaagccggtaaaaccatgctgctgcagaacattgcccagagcattgcttacaaccacccggattgtgtgctgatggttctgctgatcgacgaacgtccggaagaagtaaccgagatgcagcgtctggtaaaaggtgaagttgttgcttctacctttgacgaacccgcatctcgccacgttcaggttgcggaaatggtgatcgagaaggccaaacgcctggttgagcacaagaaagacgttatcattctgctcgactccatcactcgtctggcgcgcgcttacaacaccgttgttccggcgtcaggtaaagtgttgaccggtggtgtggatgccaacgccctgcatcgtccgaaacgcttctttggtgcggcgcgtaacgtggaagagggcggcagcctgactattatcgcgacggcgcttatcgataccggttctaaaatggacgaagttatctacgaagagtttaaaggtacaggcaacatggaactgcacctctctcgtaagatcgctgaaaaacgcgtcttcccggctatcgactacaaccgttccggtacccgtaaagaagaactgctcactactcaggaagaactgcagaaaatgtggatcctgcgcaaaatcattcacccgatgggcgaaatcgatgcaatggaattcctcattaataaactggccatgaccaagaccaatgacgatttcttcgaaatgatgaaacgctcataaatttgtcttatgccaaaaacgccacgtgtttacgtggcgttttgcttttatatctgtaatcttaatgccgcgctggcgatgttaggaaaattcctggaatttgctggcgtgttatgcaatttgcatatcaaatggttaatttttgcacaggactggtgggttcggaacggactttcccttctgaataaaggtcttcgtggttatacttctgctaataattttctctgagagcatgcattgtgaatttactgacagtgagtactgatctcatcagtatttttttattcacgacactgtttctgttttttgcccgtaaggtggcaaaaaaagtcggtttagtggataaaccaaacttccgcaaacgtcaccagggattgatacctctcgttggggggatttcggtttacgcagggatttgcttcacgttcggaattgtcgattactatattccgcatgcatctctctatctcgcttgtgccggtgtgcttgttttcattggcgcgctggatgaccgttttgatatcagcgtaaaaatccgtgccaccatacaggccgctgttggcattgttatgatggtgttcggcaaactttatctcagtagcctgggttatatctttggctcctgggagatggtgctcggaccgtttggttacttcctgacgctatttgccgtctgggcggccattaatgcgttcaacatggttgatggcattgatggcttgctgggcgggttgtcctgcgtctcgtttgcagcaatcggtatgattttgtggttcgacgggcaaaccagcctcgcaatctggtgctttgcgatgatcgccgccatcctgccatacatcatgcttaaccttggtatcctgggtcgccgctacaaagtctttatgggtgatgcgggcagtacgctgattggttttaccgttatctggatcctgctcgaaacgacccagggcaaaacccatcccatcagcccggttaccgctttgtggataatcgccattccgctaatggatatggtggcgattatgtaccgtcgcctgcgtaaaggcatgagcccattctctcctgaccgtcagcatattcaccatttgatcatgcgtgccgggtttacttcccgtcaggcgtttgtgctgattacccttgctgcggcactgctcgcttccattggcgtgctggcagaatattctcattttgtcccggagtgggtcatgctggtgctctttttgctagcattcttcctctatggatattgcattaagcgtgcctggaaagttgctcgctttattaagcgcgtaaaacgcagactgcgtagaaatcgtggtggcagccccaatttaaccaaataaatgaggatgtgatgacacaaccaatgcctgggaaaccggccgaagacgctgaaaatgaactggatattcgtgggttgtttcgtaccttgtgggctgggaagctatggattattggcatggggctggcatttgcgttaatcgcgctggcgtatactttttttgctcgtcaggagtggagctcgacggcgattaccgatcgtccaacggtgaatatgctggggggatattactcgcagcagcaatttttgcgtaacctggatgtccgttcaaacatggcttctgccgaccaaccatcggtcatggacgaagcctataaagagtttgttatgcaactggcctcgtgggatacccgcagagagttctggctgcaaaccgactattacaaacagcggatggtgggcaacagcaaagccgatgcggcgttgctggatgaaatgattaacaacatccagtttatccccggagactttacccgcgcggtcaatgacagcgtgaagcttattgctgaaaccgcgcctgacgctaataacctgttacgtcagtatgttgcttttgccagccagcgtgcagccagccatctgaatgatgagctgaaaggcgcatgggcggcgcgtaccatccagatgaaagcacaggtgaagcgtcaggaagaggtggcgaaagccatctacgaccgccggatgaacagtattgaacaggcgctgaaaattgctgagcagcataatatttcgcgcagtgcgacagatgtgcctgccgaggaattacctgattcagaaatgttcctgcttgggcgtccaatgctccaggctcgactggaaaatttacaggccgtcggtccggcctttgatctcgactatgatcagaatcgggccatgttaaacaccctgaatgttggtccaaccctggatccgcgttttcagacctatcgctatttgcgtacgccggaagaaccggtaaaacgcgatagcccacgtcgtgccttcctgatgattatgtggggcattgtcggggggctgatcggggctggtgtcgcattaacccgccgttgctcgaaatagcaacactgctgcggtgagcgcaaaggcgctcgccgcttattcgaagagaatcgatgtgaaagtactgactgtatttggtacgcgcccggaagccatcaagatggcgccgttggtgcatgcgttggcaaaagatcctttttttgaggctaaagtttgcgtcactgcgcagcatcgggagatgctcgatcaggtgctgaaactcttttccattgtacctgactacgatctcaacataatgcagccaggacagggcctgacagagataacctgtcggattctggaagggctaaaacctattcttgccgagttcaaaccagacgtcgtgctggttcacggcgacacaacgacgacgctggcaaccagcctggcggcgttttatcagcgtattcctgttggtcacgttgaggctggtctgcgcacgggcgatctttattcgccgtggccggaagaggctaaccgtacattgaccgggcatctggcgatgtatcacttctctccaaccgaaacttcccggcaaaacttgctgcgtgaaaacgttgcggatagccgaatcttcattactggtaatacagttattgatgcactgttatgggtgcgtgaccaggtgatgagcagcgatacgctgcgttcagaactggcggcaaattacccgtttatcgaccccgataaaaagatgattctggtgaccggtcacaggcgtgaaagtttcggtcgtggctttgaagaaatctgccacgcgttggcagacattgccaccacgcaccaggacatccagattgtctatccggtgcatctcaacccgaacgtcagagagccggtcaatcgcattctggggcatgtgaaaaatgtcattctgatcgatccccaggagtatttaccgtttgtctggctgatgaaccacgcctggctgattttgaccgactcaggcggcattcaggaagaagcgccttcgctggggaaaccggtgctggtgatgcgcgataccactgagcgtccggaagcggtgacggcgggtacggtgcgtctggtaggcacggataagcagcgaattgtcgaggaagtgacgcgtcttttaaaagacgaaaacgaatatcaaactatgagccgcgcccataacccgtatggtgatggtcaggcatgctctcgcattctggaagcgttaaaaaataatcggatatcactatgagttttgcgaccatttctgttatcggactgggttacatcgggctgcctacagcagcagcgtttgcctcacggcaaaaacaggtgattggtgtcgatatcaaccaacacgcggttgataccatcaatcgtggcgaaatccatatcgtcgagcctgatttggcgagcgtagtaaaaactgccgtagaaggcggttttttacgagcgagcacgacgccagttgaagcggatgcctggctgattgctgtacccacgccgtttaaaggcgatcatgagccagatatgacctacgttgaatcggctgctcgctccattgcgccagtgctgaaaaaaggcgcgctggtgatccttgaatccacctcgccggtggggtcaaccgagaagatggcagaatggttagcagagatgcgtccggatctcactttcccacagcaggtgggcgagcaggcggacgtcaacattgcttactgcccggaacgcgtgttaccgggccaggttatggtcgagctgattaaaaacgatcgcgtgattggtggtatgacgccggtttgttcgacccgcgccagcgaactgtacaaaattttcctcgaaggtgagtgtgtcgtcactaactcgcggacggcggaaatgtgtaagctcaccgaaaacagcttccgcgatgtgaatatcgcttttgctaatgaattgtcgctgatttgtgccgatcaggggattaacgtctgggaactgattcgcctggcgaatcgtcaccctcgcgttaatattcttcagcctggccctggcgtgggcggtcactgcattgctgttgatccgtggtttatcgtggcacagaacccccagcaggcgcggcttatccgtaccgcgcgcgaagtgaacgatcacaaaccgttctgggttatcgatcaggtgaaagcggcggtggctgattgcctggcggctaccgataaacgcgccagtgaactgaaaatcgcctgctttggtctggcgtttaaaccgaatattgatgacctgcgcgaaagcccggcgatggaaatcgctgaactgatcgcccagtggcatagcggcgaaactctggttgttgagcctaacatccaccagttgccgaaaaaactgaccgggctttgtactctggcgcagcttgacgaggcgctggcaacggcagacgtgctggtgatgctggtcgatcatagtcagtttaaagttatcaatggcgacaatgtccatcagcagtatgtcgtcgatgccaaaggagtctggcgctgatgagaaaaattctgataacaggtggtgccgggtttattggctcggcgctggtgcgttatatcatcaacgaaacgagcgacgcggtggtagtggtcgataagctgacctacgccggaaacctgatgtcgctggcaccggtcgcgcaaagcgagcgctttgcctttgagaaagttgatatctgcgatcgggcagaactggcacgcgtattcactgagcatcagccagactgtgtcatgcatctggcagccgaaagccatgttgaccgttctattgacggcccggcagcgtttattgaaaccaacattgtcgggacttatacattgcttgaagcggcgcgggcttactggaatacgctgacggaagataaaaaatcagcgttccgttttcatcatatctccaccgacgaagtatatggtgacctgcactcgacggatgatttcttcaccgaaaccacgccgtatgcgccgagcagcccttattccgcgtcaaaagccagcagcgaccatctggtgcgcgcctggctgcggacctacggtctgccgacgcttatcaccaactgctcgaataactacggtccttaccactttccggaaaaactgatcccgctgatgatcctcaacgcgctggcgggtaaaccgctgccggtatatggcaacgggcagcaaatccgtgactggctgtatgtggaagatcacgcccgcgcgctgtattgcgtggcgaccaccgggaaagtcggtgaaacctataatattggtggtcacaacgagcgtaagaatctcgatgttgtggaaaccatttgcgagctgctggaagaactggctccgaacaagccgcacggcgtggtgcactatcgtgacttgatcacctttgtcgctgaccgtccggggcatgatctgcgttatgccattgatgcttcgaaaattgcccgtgaacttggctggctgccacaggaaacctttgaaagtggaatgcgtaaaacggtgcagtggtatctggctaatgaaagctggtggaagcaggtgcaggacggcagctatcagggcgagcgtttaggtctgaaaggctaattttcagcggaggcaaacatgaaaggtattatcctggcgggcggttccggcacccgattgcatccgattacgcgcggcgtatcgaagcaactgttgccgatttacgataagccaatgatttactatccgctgtcggtgctgatgttggccgatatccgcgaaattctcatcatcactacgccggaagataaaggttatttccagcgcctgctgggcgatggtagtgagttcggtatccagctggaatacgccgaacagcccagcccggacggtctggcgcaggcctttatcatcggtgaaaccttcctcaacggtgaaccttcttgtctggtgctgggcgataacatcttcttcggtcagggcttcagtccgaagctgcgtcatgttgcggcgcgcacggaaggggcgacggtatttggctatcaggtgatggacccggaacgctttggcgtggtggagtttgacgacaatttccgcgctatctcgctggaagaaaagccaaaacagccgaagtcaaactgggcggtgaccgggctttatttctacgacagtaaagtcgtggagtacgcaaagcaggtgaagccgtcggagcgtggtgaactggagattacctccatcaaccagatgtacctcgaggcgggcaacctgaccgttgaactgctcgggcgcggatttgcctggctggacactggcactcacgacagcctgattgaagccagtacctttgtgcagacagtagaaaaacgccagggctttaagattgcctgcctggaagagatcgcctggcgtaacggctggctcgatgacgagggtgtgaagcgtgctgccagttcattagcgaaaactggctacggccaatatctgctggagttacttcgtgcccgtccgcgccagtattgagccactaacctgggaaaacgccttctttggtgttaacagcgccatcgtgcgcattacgtctgaagcaccgctcctgacgccagacgtgttagcgccgtggtcacgggtgcaggccaaaattgcggcatcaaatacgggtgaactggatgccctgcaacagctgggattctccctggtagaaggtgaagttgatttggcactacccgtgaacaatgtcagtgatagtggtgctgtagtggcacaagagaccgatattcccgcattacgtcagttagccagcgccgcatttgcgcaaagccgttttcgtgcgccgtggtatgcgcctgacgccagcggacgcttttatgcacagtggattgaaaatgccgtgcgcggcacctttgatcatcaatgtctgattttacgtgcggcgtccggcggtattcgcggttatgtctctttacgggaactcaatgcgacagatgcgcgaattggcctgctggctggacgcggtgcaggtgctgagctgatgcaaacggcgctaaactgggcgtatgctcgcggtaaaacaactttgcgggtggcgacccaaatgggcaacaccgccgcgcttaaacgatacatacaaagtggtgcgaatgtagaaagcaccgcgtactggttatacaggtgatcacatgattccatttaacgcaccgccggtggtgggaaccgaactcgactatatgcagtcggcaatgggtagcggcaaactgtgtggcgatggcggttttacccgtcgctgccagcagtggctggagcaacgttttggcagcgccaaagtgttactgacgccgtcctgcaccgcttcgctggagatggcggcgctgctgctcgatatccagcctggcgatgaagtgatcatgccgagctacacctttgtctccaccgccaatgcctttgtgctgcgtggcgcaaaaatcgtttttgtggatgttcgcccggacaccatgaacatcgacgaaacgctgattgaagcggcgatcaccgacaaaacgcgcgttatcgtgccggtccattacgcgggtgtggcctgcgaaatggacaccattatggcgttggcgaaaaagcataatctgtttgtggtagaagatgccgctcagggcgtgatgtccacttacaaagggcgtgcactgggaaccattggtcatattggctgctttagcttccatgaaaccaaaaactatacggcgggtggtgaaggcggcgcgacgctgattaacgataaagcgttaatcgaacgagccgagatcatccgtgaaaagggcactaaccgcagccagttcttccgtggtcaggtcgataaatatacctggcgcgatattggctccagctatttgatgtccgatctgcaagctgcgtacctgtgggcgcaactggaagcagcggatcgtatcaaccagcaacgtctggcgctgtggcaaaactactacgatgcgttagcgcctctggcgaaagccgggcgtatcgagctgccgtcgattcccgatggctgcgtgcagaacgcgcatatgttctacattaaactgcgggatattgatgaccggagcgcgttgattaactttctgaaagaagcggaaatcatggcggtgttccattacattccgctgcacggttgccctgcgggggaacgctttggtgagttccacggtgaagatcgctacaccaccaaagagagcgagcgcctgctgcgcctgccgctgttctacaacctgtcgcccgtcaatcagcgtacggtaattgcgactttgttgaactacttctcctgatatgtcgttggcaaaagcgtccttgtggacggcggccagtacactggtcaagattggtgccgggttactggtcggtaagttgctggctgtgtcatttggtccggcggggcttgggctggcggcaaatttccgccagttgattaccgtgctcggcgtgcttgccggagctggcatctttaacggtgtaaccaaatacgttgcccagtaccatgataatccgcaacagctgcgccgcgtggtcggcacttcatcagcgatggtacttggtttctctacgctgatggcgctggtttttgtgctggcagctgcgccaatcagccagggactgtttggtaataccgactatcaggggctggtgcgtttagtggcgctggtgcaaatggggatcgcctggggcaacctgttactggcgctgatgaaaggctttcgcgatgccgcaggtaatgcgttatcgctgattgtcggcagcttgattggcgttctcgcgtactacgtcagttaccgtttgggcggttatgaaggggcgttgctgggtctggcgctgattcccgcgctggtggtgattcctgccgccatcatgttgatcaaacgtggtgtcatcccgttaagctatctgaaacccagctgggataacggtctggcagggcagttgagcaaatttacgctcatggcgttgattacgtcggtgaccttgcctgttgcttacatcatgatgcgtaaactgctggcggcgcagtatagctgggatgaagtggggatctggcaaggggtgagcagtatttccgatgcctacctgcaatttattacggcatcgttcagcgtatatttgctgcccacgttgtcgcggctaacggaaaagcgcgatatcacccgggaagtggttaaatcgctgaaattcgtcttaccggcagtggcggcggcgagttttaccgtctggttgctgcgtgattttgctatctggttgctgttgtcgaataaatttaccgctatgcgcgatctctttgcctggcagttagtgggtgatgtgttaaaagtgggcgcttatgtctttggttatctggtgatcgccaaagcgtcactgcggttttatattctggcggaagtcagccagttcactttattgatggtatttgcccactggctaatccctgcgcatggtgcactgggcgcggcgcaggcatatatggcaacttatatcgtctatttttctctttgttgtggcgtgtttttactctggcgtaggcgggcatgactgtactgattcacgtactgggatcggatatccctcaccataaccgaaccgttttgcggtttttcaatgacgcgctggccgcgacgagcgagcacgcgcgcgagtttatggttgttggcaaggacgacggcttaagtgatagctgtccggcgctttctgtgcaatttttccctgggaaaaaatcgctggcggaagcggtcatcgcgaaagcaaaagctaaccgtcagcagcgattttttttccacggtcagttcaatcccacactgtggctggctctgctgagtggtggcattaagcccagccagtttttctggcatatctggggggcagacctgtatgagctttccagtggcttgagatataagcttttttacccgctacgtcgcctggcgcaaaagcgagtcggctgtgtatttgccacccgcggtgatttgagcttttttgccaaaacgcatccaaaggtgcggggcgaactgctgtacttcccgacgcggatggacccttctctcaatacgatggcgaatgatcggcaacgtgaagggaaaatgaccattctggtggggaactccggtgaccgcagcaatgaccatattgctgccttgcgcgccgttcatcagcaatttggcgatacggtaaaagtggtggtgccgatgggatatccgcctaataacgaagcgtacattgaggaagttcgtcaggcggggctggagttattcagcgaagaaaatctgcaaattttgagcgaaaaactggaatttgacgcctatctggcgctacttcgtcagtgcgatcttggttactttatttttgcccgccagcagggcattggtacgctttgcttactgattcaggcgggcattccttgtgtgcttaaccgggaaaatccgttctggcaggatatgacggaacagcatttgccggtgctgtttactaccgacgatctcaacgaggatattgtgcgtgaagcgcagcgccagttggcgtcggtggataaaaacaccattgccttctttagccctaactatctacaaggctggcagcgggcgttggcgattgccgccggggaggtcgcatgagtctgctgcaattcagtggcctgtttgtggtctggctgctctgcacgctgtttattgccacgctgacctggtttgagtttcgccgtgtgcgctttaacttcaatgtcttcttttcattgctgtttttgctcacctttttcttcggcttcccgctgaccagcgtgctggtatttcgctttgatgttggtgtcgcgccgccagaaatcttgttgcaggcgttgctttctgcgggctgcttctacgcggtttactatgtcacctacaaaacccgcctacgcaaacgcgttgctgatgtaccgcgccgtccgctgtttaccatgaaccgcgtggagaccaatcttacgtgggtgatcctgatgggtatcgcgctggtaagcgtcggcatcttcttcatgcacaacggctttttgctgttccggcttaactcctacagtcagatcttctccagtgaagtctccggcgtggcgttaaaacgcttcttttactttttcatcccggcgatgctggtggtctactttctgcgccaggacagcaaagcgtggctgtttttcctcgtcagcacggtcgcctttggcttgctgacttatatgattgtcggcggcactcgcgccaatatcatcatcgcattcgctatcttcctgtttattggcattattcgcggctggatttcgttgtggatgctggcggcggcgggcgtgctggggattgttggcatgttctggatggcgctaaaacgctatggaatgaatgtgagcggcgatgaagcgttctatacgtttctctatctcactcgcgacaccttctccccgtgggagaatctggcgttgctgttgcagaactacgacaacatcgacttccagggcctggctccaattgtccgcgatttctatgtctttatcccttcctggctgtggccgggtcgcccgagtatggtgctgaactcagccaactactttacctgggaagtgctgaataaccactccggactggcgatctcgcctacgcttataggctcactggtggtgatgggcggcgcgttgttcatcccgctcggggcgatcgtggttggtctgatcatcaaatggttcgactggctgtatgagctgggcaaccgcgagcctaatcgctataaggctgcgatattgcacagtttctgctttggggcgatcttcaatatgatcgtgctggcgcgtgaagggctggattcgtttgtctcacgcgtagtcttttttatcgtggtcttcggcgcatgtctgatgatcgcaaaactgctgtactggctttttgaaagcgccggactcattcataaacgtacaaaatcatcgctccggacgcaggttgaaggataacaatgaataacaacaccacggcaccgacctatacgctgcgtggcttacagttgattggttggcgtgatatgcagcacgccctcgattatctgtttgctgacgggcagcttaagcagggaacgctggttgccattaatgctgaaaaaatgctgaccattgaagataacgccgaggtcagggagttaattaacgctgccgaatttaaatatgcggatggcatcagcgttgtacgttcagtacgtaaaaagtacccgcaggcgcaggtttcccgcgttgccggtgccgatctctgggaagagctgatggcgcgcgcaggcaaagaagggacgccggtatttcttgtgggcggtaaacctgaagtgctggcgcaaactgaagctaaactgcgcaaccaatggaatgtgaatatcgttggcagtcaggatggttattttaaacccgagcagcgtcaggcgctgtttgaacgcattcatgccagcggagcgcaaatcgtcaccgttgcgatgggatcgccaaagcaggagatcttcatgcgcgactgccgtctggtgcatccagatgcgctgtatatgggcgttggcgggacttacgatgttttcaccggtcacgtaaaacgcgcaccgaaaatctggcaaacgctgggactggagtggctctaccgcctgctttcgcagccgagccgcattaagcgtcagcttcgtttgctgcgttatttacgctggcactacaccggcaacctctgattttcctctctttgtaaagcgacggagtggtcactccgtcgcctgtctgcttttttattacacaaagcattcaaatttttaatgctttatttgccatttctcctgaattacgaaaacattcgcaacactcgatgtacccataacgataaccggtaacaccggaaagcatgcaaacacaacacgaggatttatggcagataacaaaccagagctacagcgtgggctggaagctcgacatatcgaactcatcgccctggggggcactattggcgtcggcctgtttatgggggccgccagtaccctgaaatgggccgggccatccgtattgttggcctatatcatcgccgggctgttcgtctttttcatcatgcgttcaatgggcgaaatgttgttccttgaacctgttaccggttcgttcgccgtttatgcgcatcgttatatgagcccgttttttggttatctcaccgcctggtcttactggtttatgtggatggcggtggggatctcagaaatcaccgccattggcgtttatgtccagttctggttcccggagatggcgcagtggatacctgcattgatcgcggtggcgctggtggcgttggcgaatctggcggcggtgcggttgtacggcgaaatcgagttctggttcgcgatgatcaaagtcaccacgattatcgtgatgattgtcattggcctgggcgtgattttctttggctttggcaatggcgggcagtcgattggttttagcaatctcacagagcatggcggtttctttgcgggtggctggaaagggttcctgaccgcgctgtgtattgtggtggcgtcctaccagggcgtggagctgattggcattactgccggtgaagcgaagaatccgcaggtgacgctgcgcagtgctgtaggcaaagtgctgtggcggatcctgattttctacgtaggcgcgattttcgttatcgtcaccatcttcccgtggaatgaaattggcagcaacggcagcccgttcgtactgacttttgccaaaatcggtattaccgcagcggcgggcattatcaactttgtggtgctgacggctgcgctctctggctgtaacagcggcatgtacagttgcggacgtatgctctacgcactggcgaaaaaccgtcagttaccggcggcgatggcgaaagtttcccgtcacggcgtaccagttgcgggtgtggcagtatctattgctattctgctaattggctcatgcctgaactacatcattcccaatccgcagcgtgtgtttgtctacgtctacagtgccagcgtgcttccggggatggtgccatggtttgtgatattgataagccagctgcgttttcggcgtgcacataaagcggcgattgccagccatccgttccgctcaatcctgttcccgtgggccaactacgtaacaatggcattcctgatttgcgttttgatcggcatgtactttaatgaagatacgcgtatgtcgctgtttgttggcatcatctttatgctggcggtgacggcgatttataaagtttttggccttaatcgccacgggaaagcgcataaactggaggaataagcagcaaaacgcacaaaccgtaaccaaacgcgcaatttatttaaaaagggactagacagaggggtgggaagtccgtattatccacccccgcaacggcgctaagcgcccgtagctcagctggatagagcgctgccctccggaggcagaggtctcaggttcgaatcctgtcgggcgcgccatttagtcccggcgcttgagctgcggtggtagtaataccgcgtaacaagatttgtagtggtggctatagctcagttggtagagccctggattgtgattccagttgtcgtgggttcgaatcccattagccaccccattattagaagttgtgacaatgcgaaggtggcggaattggtagacgcgctagcttcaggtgttagtgtccttacggacgtgggggttcaagtcccccccctcgcaccacgactttaaagaattgaactaaaaattcaaaaagcagtatttcggcgagtagcgcagcttggtagcgcaactggtttgggaccagtgggtcggaggttcgaatcctctctcgccgaccaattttgaaccccgcttcggcggggttttttgttttctgtgcatttcgtcaccctcccttcgcaataaacgcccgtaataactcattgccccacggtatgatttcgcccttaacgtattgaaggatgacttcaggcaaggagtgaccatgctgcaacaggttccaacgcgtgcttttcatgtgatggcgaaaccgagtggttccgattgtaatctgaactgtgactactgtttttatctcgaaaaacaatccctttaccgcgaaaagccagtcacgcatatggacgatgacacgctggaagcgtatgtccgtcactatatcgctgccagcgaaccgcaaaacgaagtggcttttacctggcagggcggcgaaccaacgttactcgggctggatttttaccgccgtgccgtaaagttacaggcgaaatacggtgctggcaggaagataagtaacagcttccagactaacggcgtgctgctcgatgataaatggtgtgcatttctggcagaaaatcattttcttgttgggttatcgctggacggtccggctgagatccacaatcaatatcgcgtgaccaaaggtggcagaccaacgcataagctggtgatgcgtgccctgacgctgctgcaaaaacatcatgtcgactataacgtgctggtctgcgtcaaccgcaccagcgcgcagcaaccgttgcaggtttatgattttttgtgcgatgcgggagtcgaattcatccagtttattccggtggtcgagcgtctggctgatgaaacagctgcccgcgatggactgaaattgcatgcgcctggtgatattcagggggaactgacggaatggtcggtgcgccccgatgaatttggtgaatttctggtggcgatattcgaccactggatcaaacgcgacgtcggcaagattttcgtgatgaatatcgaatgggcgtttgccaattttgtcggtgcgccgggtgcggtttgccatcatcagccaacctgtgggcgctcggtgattgttgagcacaacggcgacgtttacgcctgcgatcactatgtttatccgcaatatcggctggggaatatgcatcagcaaacaattgcagaaatgatcgattccccgcaacagcaggtgtttggtgaagataaatttaagcaattaccggcgcagtgtcgcagttgtaacgtgttaaaagcgtgctggggaggctgcccgaaacaccgcttcatgctcgatgccagcggcaaaccggggctgaattatttgtgtgccgggtatcagcgttatttccgccatctaccgccatatcttaaagcaatggctgatttgctggcgcacggtcgcccggccagtgacattatgcaggcacatttgctggtggtgaataagtaaaaaagcggccattttgtggccgcctgcggttgattgccggatgcggcgtaaacgccttatccggcctacatgatcgtgcaaattcaataaattgcagcgttctgtggatactggtttgggtgatcgtatccggcaaagcctttgcgtgcggtggcagttgacggggtatctgctgcgctggccatgagaggaagagcggcggcgacagcaacaacaagaagtttgggtgaaaacgaaaattccatgcaaaatgctccggtttcatgtcatcaaaatgatgacgtaattaagcattgataattgagatccctctccctgacaggatgattacataaataatagtgacaaaaataaattatttatttatccagaaaatgaattggaaaatcaggagagcgttttcaatcctacctctggcgcagttgatatgtaaggcaggtttattatattgcgttgattattaatgcttttttagttttaacggcaattaatatatgtgttattaattgaatgaattttatcattcataataagtatgtgtaggatcaagctcaggttaaatattcactcaggaagcaaagaggattacagaattatctcataacaagtgttaagggatgttatttcccgattctctgtggcataataaacgggtagatgctcattccatctcttatgttcgccttagtgcctcataaactccggaatgacgcagagccgtttacggtgcttatcgtccactgacagatgtcgcttatgcctcatcagacaccatggacacaacgttgagtgaagcacccactgttgtcatacagacctgttttaacgcctgctccgtaataagagcaggcgtttttttatgcatcagaaaggtcccggaggtgcttgcctccgggtgagaaggaactactgtggtgggttgttctgcaacgttaacatcaaaccgtcgcgacgcatcgctgcagcttcttccggcttgtgcagtctgtccagcgcgtcggcaagccatgcgtaatcgtaggcgtccggacgttgtttcagcgctgcgcggaaggcgagcgatgcttcctgccattctccgtgcttcatcagtgactggcccagtgtgctccacaacagcgggcgatcgccgacgtttttgatctgctggcgcagcactttttccagctgttccggattgttggttttcagtcgaggaatcggcagcagtaggcgatcgtcgtactggcgtttcaggccatcgatgataatttgctgggcagtatcatgatcgtcacattcaataagatgttccgccattgccacctgcaacgctacctgatgacgcgttttccggctttggtttttccaccagttacgcaaaccttcactaccgttatcggcacgcgcctgatccatcaggccaatccatgcctgttgttccagcattgcacgatgttcttcatcaccaacatgggctttcgccattgatgggatgatatccagcagagaactccatgcacctgtgcggatatacgcctgttccgccagacgtaatacttccggatggcgtggcgtaacttccagcagcttatccacgccgtggcgtgcagcatggttttcattacgggccagttgcagacgtacacgggtgatttctaccggaatggtgtcattgccggccagctctgctgcgcgttccagatgttggttggcgcgtgcttcatcaccacgttgttgcgcggcttcggcagccagtagatagttcaccaccggttgttccgcgtgatcggcatttttcgccatcagcttttcaacttgctgataatcgccttccgccagtttcagcagcgcctgttcggtctgcttacgggcacggcgacgcttacgtccgacaaaccacccacgggtgtgtgcgcctgtgcggaagatccgccgcagtagccactcaatggcaaacagcactaccatcgccagaatcaaaataatcgccaggcccgtgacgctggtttcgatattgtagttgtcagtctggatcagcacgtaaccctgatgaccggcaatcatcgggccaaccactatccccgcaatcagcaaaacaaagagtaataacacttttagcatggttattctccttgcggcgcggctgccggagtatcaccttgcggtgcaggtgcaggtgcaggtgcaggtgcaggtgcaggtgcaggtgcaggtgcaggtttagcttccgttgtccccgctgccggttgtgccagcaggttacgcacgcgggtctgcatcagtttttccagcatcgcctggctttgcagggtttccggaagatccatcgagatattttgctggcttaactggtccacctcgtcgaggaacgctttggtggtggcatcatcagtatcgtagtaagcacgtacccaggtggagacgttctccagcgcctggcgataagtctcttcctgatgacgcggtacagcttgtgctgcgaccagcaggcgagagcgaatattttcgcgcagatagatatcctgatttggcgctaacagcggtacggcggtgtcatcacgacggcgaatcgtaatgaagttgtccataaagttctgccagcttttttgcagattgatacgccattcgctgatggaactggaaagctcttcaccgtctgaatccatcggcgaaccatcgctgtcattatcggccagacgcaggttatctacctgatttgaaagctgattaagcttaaggatgatgccgtcataatccacctgcgatactgcagaaaggctggcgatatcatcggtaattgcccgacgaacggtaatcagactcgggtcattcatatccgccaggctggcgtctgcacttttcagcaacgctgcagcggtcgtgacgtcctgatcgctccacagcttccgtccggcgagtttcaccagaaaatcggcctgggccagcagccaggttttagcatcgctgccggaaatggtggcgaccttttgctggacttcatccagctgttttgccagcgtttcttgctgacgattcgcctgttcaagctgcgtagcctgttgcttaataatgccttccagttcggctttttggctctcctgggctttttgcaatgccgtcagttggttagccagggcatcgctggtggcggtctgattgacggcctgttgtttaccccagccatacaaaccgacgcccgccgccagagcaatagcgatagccgccgcgctgagaatcaatgcggtattgttcttactctttttttctgttgcgacaggttgtgacgtggtgtccacggcctccctagtctcttcaaccacggcggaggttttttcttgttccgtcattatggcttcctgttatgagagttattgtaatgcccgtaaaagcgcatcgttggcagcgttatcggcgaccttaatgtcttgccagcccagttcccgggcgagtttcgccaaacgctcactgacgaccaatagtcgacagtgtagtaaccagtgctcacgataccattgtgggatcagcgaccagagttgctgcaacatttcaccgctggtaacaacgaccgtcgtcacctcgcgggattgccagcgcatcgcttcttctgcaccatcgtaatggattgcgcatcgttgataacattcacaaaaagtgacctcagcaccgcgcgccgtcagggtatccccaattagctcacgaccgccattgccacgtaatatcagcgcacgtttgcccgcaatattttgtaattcaggtaattgtagcaagacttcgctgatttcccgatcctgcgggtagagaatcttctgtccgcttacggtatgtagtgccagtgcggtggtgcgtccaatggcgaaataattaggtagtcggggccatttacgatcttgctgatgtagctgtgattgggcaaaagcaaccgcgtgttgcgagagggcaaacaacagatcgctctcccccagcgctgccagttgatcagcaagttgcggtaattgttgacccggagaaaactcaatcagcggaaaatgccaggccacctgccccagtgtgcgcagacggctcactaactcttctccagcgggagacgggcgggtgacaaggatactcatgccggggcgtctccgttatagacttcagcgaggatctcgcgcgcgccgttattcagtagctcttctgccagcgaaatccccatttgtttggcattttgcggcgcaccgcggcgttcaccgcgaataatctgcgaaccgtccggcgcgccgaccagcgcacgcagccagatttcgccatcaataagctcggcgtagctaccaattggcacctgacatccgccttcgagacgggtattcatggcgcgttctgcggtaacgcgcagtgcagtttcgtggtgattcagcgcggcaagcagctcgcgagtgcgcgtatcatcaaggcggcattcaataccgactgcaccttgtcctaccgccggaagagaaatctcgggtggtaacgcggcgcgaatgcgggactccagacctaaacgttttagtccggctacggcaagaatgatggcatcgtattcgccgttatctagtttgctcaggcgagtgccgacgttgccgcgcagggagcggataatcagatccgggcggcgttcagccagttggcactggcgacgtaaactggacgtcccgacgatactgcctgctggtaacgcatccagactgtcatagttattggacacaaaggcatcgcgaggatcttcacgctcacaaatagtgaccagtcccagaccttgcgggaattcaaccggcacatctttcattgaatgtacggcgatatcggcgcgattttcgaggagcgcgacttccagctcttttacaaataagccttttccgcctactttcgccagcggcgtatcaagaatcacatcgccgcgcgtcaccatcggtaccagttcaacgaccaggcccggatggctcgccatcaacttgtctttgacatagtgtgcctgccagagtgcaagtgggctttggcgtgtggcaattcttaaaacattgtctaacatgcttgttaccgtcattatcatccgtggtccatcctaacatccttgccagagtgatgtcagtgttgtggtgaaacgtagacgcctgcgcaaaccgtaaaatgaggtctggcagtggatcctgacagacgtttcacgctgtcgtaataaggaatttacagagaataaacggtgctacacttgtatgtagcgcatctttctttacggtcaatcagcaaggtgttaaattgatcacgttttagaccattttttcgtcgtgaaactaaaaaaaccaggcgcgaaaagtggtaacggttacctttgacatacgaaatatcccgaatgccgcgtgttaccgttgatgttggcggaatcacagtcatgacgggtagcaaatcaggcgatacgtcttgtacctctatattgagactctgaaacagagactggatgccataaatcaattgcgtgtggatcgcgcgcttgctgctatggggcctgcattccaacaggtctacagtctactgccgacattgttgcactatcaccatccgctaatgccgggttaccttgatggtaacgttcccaaaggcatttgcctttacacgcctgatgaaactcaacgccactacctgaacgagcttgaactgtatcgtggaatgtcagtacaggatccaccgaaaggtgagcttccaattactggtgtatacaccatgggcagcacctcgtccgtagggcaaagttgttcctctgacctggatatctgggtctgtcatcaatcctggctcgatagcgaagagcgccagttactacaacgtaaatgcagcctgctggaaagctgggccgcctcgctgggtgtggaagtcagcttcttcctgattgatgaaaaccgctttcgtcataatgaaagcggcagcctggggggcgaagattgtggctccacccagcatatactgctgcttgacgaattttatcgtaccgccgtgcgtctcgccggtaagcgtattctgtggaatatggtgccgtgcgacgaagaagagcattacgacgactatgtgatgacgctttacgcgcagggcgtgctgacgccaaatgaatggctggatctcggtggcttaagctcgctttctgctgaagagtactttggtgccagcctttggcagctctacaagagtatcgattccccatacaaagcggtgctgaaaacactgctgctggaagcctattcctgggaatacccgaacccacgtctgctggcgaaagatatcaaacagcgtttgcacgacggcgagattgtatcgtttggcctcgatccatactgcatgatgctggagcgtgttactgaatacctgacggcgattgaagatttcacccgtctggatttagtacgtcgctgcttctatttaaaagtgtgcgaaaaactcagccgtgaacgcgcctgtgtaggctggcgtcgcgcagtgttgagccagttagtgagcgagtggggttgggacgaagctcgtctggcaatgctcgataaccgtgctaactggaagattgatcaggtgcgtgaggcgcacaacgagttgctcgacgcgatgatgcagagctaccgtaatctgatccgctttgcgcgtcgcaataaccttagcgtctccgccagtccgcaggatatcggcgtgctgacgcgtaagctgtatgccgcgtttgaagcattaccaggtaaagtgacgctggtaaacccgcagatttcacccgatctctcggaaccgaatctgacctttatttatgtgccgccgggccgggctaaccgttcaggttggtatctgtataaccgcgcgccaaatattgagtcgatcatcagccatcagccgctggaatataaccgttacctgaataaactggtggcgtgggcatggtttaacggtctgctgacctcgcgcacccgtttgtatattaaaggtaacggcattgtcgatttgcctaagttgcaggagatggtcgccgacgtgtcgcaccatttcccgctgcgcttacctgcaccgacaccgaaggcgctctacagcccgtgtgagatccgccatctggcgattatcgttaacctggaatatgacccgacagcggcgttccgcaatcaggtggtgcattttgatttccgtaagctggatgtcttcagctttggcgagaatcaaaattgcctggtaggtagcgttgacctgctgtaccgcaactcgtggaacgaagtgcgtacgctgcacttcaacggcgagcaatcgatgatcgaagccctgaaaactattctcggcaaaatgcatcaggacgccgcaccgccagatagcgtggaagtcttctgttatagccagcatctgcgcgggttaatccgtactcgcgtgcagcaactggtttctgagtgtattgaactgcgcctttccagcacccgccaggaaaccgggcgtttcaaggcgctgcgcgtttctggtcaaacctggggcttgttcttcgaacgcctgaatgtatcggtacagaagctggagaacgccatcgagttttatggcgctatttcgcataacaaactgcacggcctgtcagtgcaggttgaaaccaatcacgtcaaattaccggcggtggtggacggctttgctagtgaagggatcatccagttcttcttcgaagaaacgcaagacgagaatggctttaatatctacattcttgacgaaagcaaccgggttgaggtgtatcaccactgcgaaggcagcaaagaggaactggtgcgtgacgtcagtcgcttctactcgtcatcgcacgaccgcttcacctacggctcaagcttcatcaacttcaacctgccgcagttctatcagattgtgaaggttgatggtcgtgaacaggtgattccgttccgcacaaaatctatcggtaacatgccgcctgccaatcaggatcacgatacgccgctattacagcaatatttttcgtgatgaacgtgccggaaagcgaggcttatccggcatgcaatcttagcggaaactgactgtttcacccgcctgctgcgtcgccgcctgttccagcaaatcccagaaggtttcgccgctgcgatcgcaaatccactcatcgcctttcagatcaaaatggtagccgccttgtttggttgccagccatacctggtgcagcggttcctggcggttgataatgattttgctgccgttttcaaaggtaatggtcagcacgccgccgttgatttcgcagtcgatatcgctgtcgccatcccagtcgtccaggcgttcttcaatggtcagccagagttgatcagccaggcgatgaaattcactgtcgttcattgttgtatcctgtttttaagtgatggcggcagtatagcggcatggggtcagggcttcaaagtttgcacctctgcggctgcgttccggcacgattcatccgtcaccggaataatgatgtctctgtgtagcgaaagatttgtctcttcattagggcgcagttacaccacgcctttccctgtttctggtaaacattatgatcaggtttaccgagcgagcatcctcacgctgacggaactaaaaaagacaacaaacaaaccacattgcgatagtgcatagagccatcctggcgcgaggtgccgatcacgaaactaccagcaaaacataaatccccacgagtaagcgttatactcgcagcatttcctcacttttcagacttcataaagagtcgctaaacgcttgcttttacgtcttctcctgcgatgatagaaagcagaaagcagaaagcagaaagcagaaagcagaaagcagaaagcagaaagcagaaagcagaaagcagaaagcagaaagcagaaagcgatgaactttacaggcaatccataatgaaaaacgtgtttaaggcactcactgtattacttactctcttcagcctgacgggctgcggtctgaaaggtccgctctatttcccgcctgcagataaaaacgcaccgccgccgaccaaaccggtagagacgcaaacgcaatccacggtgccggataaaaacgatcgcgccactggcgatggtccatcccaggtgaattactaaaagtcagtttctgtacccgcgtgattggagtaaatgatgcagttctcgaaaatgcatggccttggcaacgattttatggtcgtcgacgcggtaacgcagaatgtctttttttcaccggagctgattcgtcgcctggctgatcggcacctgggggtagggtttgaccaactgctggtggttgagccgccgtatgatcctgaactggattttcactatcgcattttcaatgctgatggcagtgaagtggcgcagtgcggcaacggtgcgcgctgctttgcccgttttgtgcgtctgaaaggactgaccaataagcgtgatatccgcgtcagcaccgccaacgggcggatggttctgaccgtcaccgatgatgatctggtccgcgtaaatatgggcgaacccaacttcgaaccttccgccgtgccgtttcgcgctaacaaagcggaaaagacctatattatgcgcgccgccgagcagacaatcttatgcggcgtggtgtcgatgggaaatccgcattgcgtgattcaggtcgatgatgtcgataccgcggcggtagaaacgcttggtcctgttctggaaagccacgagcgttttccggagcgcgccaatatcggttttatgcaagtggttaagcgcgagcatattcgtttacgcgtttatgagcgtggggcaggagaaacccaggcctgcggcagcggcgcgtgtgcggcggttgcagtagggattcagcaaggtttgctggccgaagaagtacgcgtggaactccccggcggtcgtcttgatatcgcctggaaaggtccgggtcacccgttatatatgactggcccggcggtacatgtctacgacggatttattcatctatgaagcaaccaggggaagaactgcaggaaacactcacggagcttgatgaccgggcggttgtcgattatctgattaaaaatcctgagttttttatccgtaatgcgcgcgcagtagaagcgatacgtgtgccgcatccggtacgcggcaccgtttcgttggtcgagtggcacatggcccgcgcacgtaatcatattcatgttctggaagagaacatggcgctgttgatggaacaggctatcgccaacgaaggcctgttttatcgcctactctacctgcagcgcagtctcaccgccgccagcagtctcgacgatatgctgatgcgctttcaccgctgggcgcgcgatctcggcctggcaggtgcgagtctgcgcctgtttccggatcgctggcgcttaggtgcgccgtcgaaccacactcatctggcattaagccgtcagtctttcgaaccgctgcgtattcagcgtttggggcaggaacagcactatcttgggccgcttaacggaccagagctgctggtggtgctaccggaagcgaaagcggtgggatcggtggcgatgtcgatgctgggaagcgatgctgatttgggtgtcgtgctgtttaccagtcgcgatgccagtcactatcaacaagggcagggaacgcagttacttcatgaaattgcgctgatgttgccggagcttctggagcgttggattgaacgcgtatgaccgatttacacaccgatgtagaacgctacctacgttatctgagcgtggagcgccagcttagcccgataaccctgcttaactaccagcgtcagcttgaggcgatcatcaattttgccagcgaaaacgtcctgcaaagctggcagcaatgtgatgtgacgatggtgcgcaattttgctgtacgcagtcgccgtaaagggctgggagcagcaagcctcgcgttacggctttctgcgctacgtagcttttttgactggctggtcagccagaacgaactcaaagctaacccggcgaaaggtgtttcggcaccgaaagcgccgcgtcatctgccgaaaaatatcgacgtcgacgatatgaatcggctgctggacattgatatcaacgatcccctcgctgtacgcgaccgtgcaatgctggaagtgatgtacggcgcgggtctgcgtctttccgagctggtggggctggatatcaaacacctcgacctggagtctggtgaagtgtgggtaatggggaaaggcagcaaagagcgccgcctgccgattggtcgcaacgctgtggcgtggattgagcactggcttgatttgcgcgacctgtttggtagcgaagacgacgcgctttttctgtcgaaactgggcaagcgtatctccgcgcgtaatgtgcagaaacgctttgccgaatggggcataaaacaagggctgaataatcacgttcatccgcataaattacgtcactcgttcgccacgcatatgctggagtcgagcggcgatcttcgtggtgtgcaggagctgctgggtcatgccaacctctccaccacgcaaatctatactcatcttgattttcaacaccttgcctcggtgtacgatgcggcgcatccacgcgccaaacgggggaaataatgcgtttttaccggcctttggggcgcatctcggcgctcacctttgacctggatgataccctttacgataaccgtccggtgattttgcgcaccgagcgagaggcgcttacctttgtgcaaaattatcatccggcgctgcgcagcttccagaatgaagatctgcaacgcctgcgccaggcggtacgggaagcggaacccgagatttatcacgacgtgacgcgttggcgttttcgttcgattgaacaagcgatgctcgacgccgggctgagtgccgaagaagccagtgcaggcgcacacgcagcaatgattaactttgccaaatggcgcagccgaatcgacgtcccgcagcaaactcacgacaccttaaaacagctggcgaagaaatggccgctggtggcgatcaccaacggtaacgcccagccggaactgtttggtttgggggattattttgagtttgtgctgcgcgctggcccgcacgggcgctcaaaaccgttcagcgatatgtactttttggctgcggaaaaactcaacgtgccgatcggcgagatcttacatgttggggacgatctcaccactgacgtgggtggggcaattcgcagcggaatgcaggcttgttggatcagaccggaaaatggcgatctgatgcaaacctgggacagccgtttactgccgcatctggaaatttcccggttggcatctctgacctcgctgatataatcagtaaatctgtatatatacccagctttttggcggagggcgttgcgcttctccgcccaacctatttttacgcggcggtgccaatggacgtttcttacctgctcgacagccttaatgacaaacagcgcgaagcggtggccgcgccacgcagcaaccttctggtgctggcgggcgcgggcagtggtaagacgcgcgtactggtgcatcgtatcgcctggctgatgagcgtggaaaactgctcgccatactcgattatggctgtgacgtttaccaacaaagcggcggcggagatgcgtcatcgtatcgggcaactgatgggcaccagccagggcggcatgtgggtcggcaccttccacgggctggcgcaccgtttgctgcgtgcgcaccatatggacgccaatctaccgcaggatttccagatcctcgacagtgaagaccagctacgcctgcttaagcgtctgatcaaagccatgaacctcgacgagaagcagtggccgccgcgccaggcaatgtggtacatcaacagccagaaagatgaaggcctgcgtccgcatcatattcaaagctacggtaatccggtggagcagacctggcagaaggtgtatcaggcgtatcaggaagcgtgcgatcgtgcgggcctggtggacttcgccgagctgctgctgcgcgctcacgagttgtggcttaacaagccgcatatcctgcaacactaccgcgaacgttttaccaacatcctggtggacgaattccaggataccaacaacattcagtacgcgtggatccgcctgctggcgggcgataccggcaaagtgatgatcgttggcgatgacgaccagtcaatctacggctggcgcggggcgcaggtagagaatattcagcgtttcctcaatgatttccccggtgctgaaactatccgtctggagcagaactaccgctctaccagcaatattctgagcgccgcgaacgccctgattgaaaacaacaacgggcgtctgggtaaaaaactgtggaccgatggcgcggacggtgagcctatttccctctattgcgcttttaacgaactcgacgaagcgcgttttgtggttaaccgcatcaaaacctggcaggacaacggcggggcgcttgccgagtgcgccattctctaccgcagtaacgcccagtcgcgtgtactggaagaagcactgttgcaggccagtatgccgtaccgtatttacggcgggatgcgcttcttcgaacgccaggaaatcaaagacgcgctctcgtatctgcgtctgattgccaaccgtaacgacgacgcggcgtttgagcgcgtggtgaatacgccaacgcggggtattggtgaccggacgctggacgtggtacgtcagacatcgcgcgatcgccagttaacactctggcaggcatgtcgtgaactgttgcaggaaaaagccctcgccgggcgagctgccagcgccttgcagcgatttatggaattaatcgatgccttagcgcaagaaactgccgatatgccgctgcatgtacagactgaccgggtaattaaagactccggcctgcgtaccatgtacgagcaggagaagggcgaaaaaggtcagacgcgtatcgaaaacttagaggaactggtgacggcaacgcgccagttcagctacaacgaagaagacgaagatttaatgccgctgcaggcgttcctctcccatgcggcactggaagcaggtgaagggcaggcggatacttggcaggatgcggtgcagttgatgacgctacactcggcgaaagggctggagttcccgcaggtgtttatcgtcggtatggaagagggcatgttcccaagccagatgtcgctggatgaaggcggacgtctggaagaagaacgccgtctggcctacgttggcgtaacccgtgcgatgcagaaactgacgctgacctacgcggaaactcgccgtctgtatggcaaagaggtttaccatcgcccgtcgcgctttatcggcgagctgccggaagagtgtgtggaagaggtgcgcctgcgcgccacggtaagccgcccggttagccatcagcggatgggtacgccgatggtcgagaacgacagcggctacaaactcggccagcgcgtgcgccacgctaagtttggtgaaggcaccatcgtcaatatggaaggcagcggtgaacatagccgtttgcaggtggcattccagggccagggaatcaaatggctggtggcggcttacgcccggctggagacggtgtaatttacaactccgttgcaggatgcggtgcgccacaccgcatcctgcatcagcaccttacttagcgcacttcttcacatcaatattccagtcagcaccagacgcaacttgatgtttctgcgcgaaattatccatattgagcgccacggaaacattcaataagctgtttagatacaccatcggctggccttccggcacatcgccgaagcttgcgacatacggcattttccctgcgtatttttgctgggaaccttcggaaatggttacacacaacgtgtcgttgagtttgattcctgcctgattcagcaactcgtcgctgatattgctccagacgttgccgtactgaatatcgagaatcgggatattgcccttcacttcaccttttgttgctttggctttctgataagaaagttcgacaacttttgcaggaagctctggccccacctgttcgaacgtgatcgctccggaagccaggcgtgcaccggtgtaggcatacacgtcacgaccgtggaaggtatatgacttttcggaacctttcaggcggttggttttttcatcgatttgccggacgctctcaatacccagcgattccgccaccaaagtgagcgtaccgttatctggtgaaacgaagtattgaccgtttttggtttttagcactaccgatttacggtctgtaccaacaccaggatcgaccacactgacaaataccgaaccttgcggccagtaactggcggtctgatacaggcggtaagcgccttcccagatgttatacggtggaatttcgtgtgttaaatcaaatattttaagattatggtcaacaccgaatgcgacccctttcatcgccgagacggcaccatctttcaggctaaaatcagtttgtaaaatcaaagcgttatccgcataagcggatgatgatcccagacacgttaataaaaataacgttgcgagcgtttttttcatttttgtttcccttcatttatctgatgatttttcagctgtgtagccagccccagtttgtctggcctcctcgagtgtacaatgcttaacctttcctctcgacggaaatcatggtgacaaaaggatagcgttgccacgggattgccccgcctttcatatacatatgtgaaatcgtgccatcaagataaagcagctgctcaacgttcagtttcgctttggcataacaggcaaaatcataaaaatttgtcgcctgctggctcaacaaaaacacggcattcccatgtttattaatcccaacaccgttacgaattttacgtgaggcgacgttgggatgaatacgcggattaattacactgttttccatcaacattggccctgactgcaccgcaaactgaatctctttactggttttgaaggcatccagacgaacgatgtcgactttatctcccgcgacataaaacacgccgccaggacggataaagaaattcccttcacctgaagcgagatttaacgccaccttctgctgtaatgccgatcagttaaggatcagttgaccgatccagtggctgtgtaagaatccggaaacgctcacttgtttccggatttttttatgcacattggacaggctcttgatctggtatcccgttacgattctctgcgtaacccactgacttctctgggggattacctcgaccccgaactcatctctcgttgccttgccgaatcaggtactgtaacgctacgcaagcgccgtcttcccctcgaaatgatggtctggtgtattgttggcatggcgcttgagcgtaaagaacctcttcaccagattgtgaatcgcctggacatcatgctgccgggcaatcgccccttcgttgcccccagtgccgttattcaggcccgccagcgcctgggaagtgaggctgtccgccgcgtgttcacgaaaacagcgcagctctggcataacgccacgccgcatccgcactggtgcggcctgaccctgctggccatcgatggtgtgttctggcgcacaccggatacaccagagaacgatgcagccttcccccgccagacacatgccgggaacccggcgctctacccgcaggtcaaaatggtctgccagatggaactgaccagccatctgctgacggctgcagccttcggcacgatgaagaacagcgaaaatgagcttgctgagcaacttatagaacaaaccggcgataacactctgacgttaatggataaaggttattactcactgggactgttaaatgcctggagcctggcgggagaacaccgccactggatgatacctctcagaaagggagcgcaatatgaagagctcagaaaactgggtaaaggcgatcatctggtgaagctgaaaaccagcccgcaggcacgaaaaaagtggccgggactgggaaatgaagtgacagcccgcctgctgaccgtgacgcgcaaaggaaaagtctgccatctgctgacgtcgatgacggacgccatgcgcttccccggaggagaaatggcggatctgtacagtcatcgctgggaaatcgaactgggatacagggagataaaacagacgatgcaactgagcaggctgacgctgagaagtaaaaagccggagcttgtggagcaagagctgtggggtgtcttactggcttataatctggtgagatatcagatgattaaaatggcggaacatctgaaaggttactggccgaatcaactgagtttctcagaatcatgcggaatggtgatgagaatgctgatgacattgcagggcgcttcaccgggacgtataccggagctgatgcgcgatcttgcaagtatgggacaacttgtgaaattaccgacgagaagggaaagggccttcccgagagtggtaaaggagaggccctggaaataccccacagccccgaaaaagagccagtcagttgcttaactgactggcattacaccttctgctgaccgttttcgatgtacaaaccgagcggcgcatagctttcatcatagatgccgccgttcatcgccatctgcacctgaccctgactattcatatccaccagcagagcatgtaaagttccccacgcttcgccattggctttttgccagtacattttcacccgctctgtttgaggattaacggtatacgcctgtacggtcagcatcggatctgagagtgcgcaatcatcagcggcaacagcaaacaagggaagtaaggtgagggcgagaaaaatccgtttgagattcaaggtgatcattcctttaccaatgagtagccgatgcgccattataggtcctggatgttggatttttttatcctgttagcgaccttgacgagtaccaaaaagcgcgaagttcaactattgttctgtggtgttctgttgcgtgttgacggcaaaattttgctggcgtaacatgcgcgcacgatcactctaagaggacattcgccttggacacacccagtagatactggctcactatcctgtcatccaggatcaactcctaaggctatccctttttgctgatagccttagcggttgtcagcgacctcaatttttcccgtcgcgctgagtcaggctgtttaatggtctgaaacccaatttgtttctgtgtgcccaccgaactgtccgatattttaagcattgggagtcccggtcatgctgagcgcatttcaactggaaaataaccgactgacccggctggaagtcgaagagtcacaaccccttgtaaatgcagtatggattgatcttgtcgaaccggacgacgacgagcgactgcgcgtacaatctgaacttggccagagcctggcaacccgcccggaactggaagacatcgaagcatcggcacgtttctttgaagacgacgacggcctgcatattcactccttcttcttctttgaagatgcggaagatcacgccggtaactccactgtggcatttaccatccgtgatggtcgtctgtttactctgcgtgagcgtgaactgcccgcttttcgtctgtatcgtatgcgtgcccgtagccagtcgatggtagacggtaacgcctacgagctgctgctggatctgttcgaaaccaaaatcgaacagttggcagatgaaattgaaaatatctatagcgacctggagcagttgagccgggtgattatggaagggcatcagggcgatgagtacgacgaggcgctctccactctggcggaactggaagatatcggctggaaagttcgcctgtgtctgatggatacccagcgcgcgctcaacttcctggtgcgtaaagcgcgtttaccgggtgggcaactggagcaggcgcgtgaaatcctgcgagatatcgaatccctgctgccgcataacgaatccctgttccagaaggtgaacttcctgatgcaggcggcgatgggttttatcaacatcgagcagaaccgcatcatcaaaatcttctcggtggtatccgtggtattcctgccgccgacgctcgttgcttccagctatgggatgaactttgagtttatgccagaactgaagtggagtttcggctacccaggcgcgattatctttatgatcctcgcgggcctggcaccgtatctgtactttaagcgcaagaactggctgtaatatgagtgccggataaagctatttttttatccggcttatttctaaaaattgtcttatttaaagtcatgcggattgaaaactcgctctattttattttcttgtgttaattgatactcagtaaaatcgttaataccaatatgagtgttacgataagggtattcattaataaccattaagtaatttttcacgatgcaattatcattgctcttaattgtcgggaaacagtagagatcttcatacggcccttcgatatattttttatagtcagtgaagccattaccgatatcaatgacataccaggtatgccaactaccttctggtaggggatgttgatttttaatttcattctgatgcttcagataccaatttattttatcgctgtcagtccatggcagatgatcaacgaccagaaagactgaattgccagcatcagagtatgtatacaaaatctgtacaggacgcaatgtccataaattatagatgcagcatagaagaaataaacataatataattttctggagtttgcttttcatagataattttcgattctttcgatagtgttaaaattggtgaaaaaaggtttgaaagcaaagtctttatgccgttgtaaaaagaaccatatgcgaaaaaatctatatttgctgtaagtcttgtttttgatatcagttacatcaagaccgaagtggtcctgtgctacaaaatgaattgttgcactccatcctatagcgtatttttgaaaacttaaaagagatattttttgagctgaaatatcatgaacactgattcctaagccattaaaactgtcctcgaagtcattaaatttatttagtcttgatgaaagtaatttggttttaatgctttgcaggataagaggttggtatcctgtcgagggagttgaattaatgccattttcgatacattctttgattattcgtattggactattataaccatatttattttttcatgaaaagataaatttaattgttggctatgaaaattgctgccatttccatatctaaaatgttcaatcagatcttcgataagtgttttatattgtccaaaaaaggaaaacatttttgctagttctttcatttctgcaaataaaatatcagtgcattcacgttgtgatatttttgttccggaacttgggtaatgactccaacttattgatagtgttttatgttcagataatgcccgatgactttgtcatgcagctccaccgattttgagaacgacagcgacttccgtcccagccgtgccaggtgctgcctcaaattcaggttatgccgctcaattcgctgcgtatatcgcttgctgattacgtgcagctttcccttcaggcgggattcatacagcggccagccatccgtcatccatatcaccacgtcaaagggtgacagcaggctcataagacgccccagcgtcgccatagtgcgttcaccgaatacgtgcgcaacaaccgtcttccggagactgtcatacgcgtaaaacagccagcgctggcgcgatttagccccgacatagccccactgttcgtccatttccgcgcagacgatgacgtcactgcccggctgtatgcgcgaggttaccgactgcggcctgagttttttaagtgacgtaaaatcgtgttgaggccaacgcccataatgcgtgcagttgcccggcatccaacgccattcatggccatatcaatgattttctggtgcgtaccgggttgagaagcggtgtaagtgaactgcagttgccatgttttacggcagtgagagcagagatagcgctgatgtccggcagtgcttttgccgttacgcaccaccccgtcagtagctgaacaggagggacagctgatagaaacagaagccactggagcacctcaaaaacaccatcatacactaaatcagtaagttggcagcatcacccggaacttgaggcactaaaagcaacattaatagaacctgggccagggaaatggtatttaataagtctgtaaggatcaacttttgctgagatatcgcttaggccgagtgagagaaagtcttgttctaccatatcaccatattgcatatcatcagcagaaaaatcatcgaataaactaatagtttcgaaaagtgtacagggaatattaattggcggaagtaatatgttattcatttgcatttgccttggttatatttaagctcaagatcaattcgagaacaaatgctagggtaaaaaaatatttaaaaaagaagtacacttcacattttttcattacatctctgaagagaacctcgttaatgattggtcttgctcattgttaataacaaaatgttgaatttaccgattaggaaactttttcctacgcggattgcctccagctatggcatgaactttgagtttatgccagaactgaagtggagctttggctaccctggcgcgattatctttatgatccttgcgggcctgacaccgtatctgtactttaagcgtaagaactggctgtaactatacgatgtcgctgtgagtaagttagtgtgctgacagcgacattttagccgagggaatcgcagataacataattgttgtgaataatatccatgccacgttgagttggacgcttaatgactcacatctcaccccttcaattgctgcagagataatagaaaaaagtgtcaaacccaatgaaatcaatacaaagtagattgccttacatccagtatctcttattctttttgctccaatattgatatttacataggtattattaataaccagaataaaactcaaagccaggttgatatcattcaaagttattaatattgaccatgatgttaatgtatagattatgaactgaaagcgtgataaacgctcaagcctggatgggtagaatatatttctgatggatgatttgaacatttttacattgttttatatatataattgttttgaatatatattacctgaattatgtggtttgcatatatatatgcaatatagcagtctttgcattgataactatacagtagtaatttagagtgtgtaagtttttattgatggggtatattttaattaaatataattgaaatgtatttttattctataaacaatatcttgggtgaatggattctatatgggaaatggtaacttttggcagttgttcttgggtaaagaaccttacagcaaaaaatctgattttgttaaggcatggttattgtggtgggctattaccatccttgttctatttattttaagcctgactacgacattaaatttaagaagtataggtatagggttaagttttgggttttgtcaaatccttggtagatatacgatgtctctaggatggagtaagtactggggagttttgggggtatttcctgtaacaaatattgttctttttcttatcttaatttttttcaaaaaaagataaataagtcagtgggtaggctctttaaacggcctacccatgttaattcttaactttttctacgctgcgtataaatcgcatccatcacaaaaattgccagcgccacccaaataaaggcgaaagtcaccatcttatcggcacccggtttttcaccataaaacgtcacagccagcaggaacatcagcgtcgggccaatgtactggaaaaagcctaacgttgagagacgcaagcgcgtggcagcggcggtaaaacacaacagcggtacggtagtgacaataccggcggcgatcagcagtaaattcagcgacatcgggttttgccccatatggctggttgagctgtcggcaatagcaaacaggtaaattgccgccacgggcagcagccacatggtttcgattaacatgccggtttgcgcttcaacggcaatcttcttgcgtaccagaccgtagaaggcaaaactaaatgccagtcccagcgcgataataggtagcgaaccaaaagtccacagctggactaacacgccacatatcgccagaatcaccgccagccattgcatccggcggaatcgctcgccgaggaaaatcatccccagcacaatgttcaccagcgggttaataaagtaaccaaggctcgcttccagcatatggtgattgttcaccgcccagataaacagtagccagttgccaccaatcagcacggcagagactgccagcataaaaattttctgtggcgtctgaatcagcgtttttaaataggaccactggcggcaaatgctcatcagcaccaccataaagaaaaacgaccagatcacgcgatgcgtcaggatttcatcggcgggcacgtagtaaatcaacttgaagtacgctggcgctataccccaaataaaataagcggcaagagcgagtaatacgccctgccgcgtttgttttgcatccatcgggaatactcatttttaattggtaacagcagtttacctgcttttatgtcttcaacctaccatataggtggcggtggcactggcaatataaagctgttcttcattgtgtaattcaacgcgggcgacggcgactttattgcctgcacgcaacaggctactggtagcagtaaaacgctcgcccctgcctgggcgcagataatcaacgcgaagatcaatggtccccatccgcgatagccgctggcgtagttcatcttcactgatggtttcgtggcgggttaaggtacttcccacgcacaccagaccggcggcgacatccagcgccgacgcaatgaccccgccgtgcaaaatgctttgcgcccagttgcccaccatcattggctgatttttaaaggccagctgtgcgaactctttttcgtaacgctccagttccatccccaatgcgcggttaaatggcatgtgataaacaaacatctcacccactaatttcagggcttgttcagcggtcagtacggcagacatatcatccttacacttcattggttaatgaaatgttgattttatgcttctttgttgttggtttctactttaggaagggataactaacggctatggagttaagtatgtaaaatagcccgcagaaaaatattcaccttatcaataattcgttacggagaacacgaccgatgcggactctgcagggctggttgttgccggtgtttatgttgcctatggcagtatatgcacaagaggcaacggtgaaagaggtgcatgacgcgccagcggtgcgtggcagtattatcgccaatatgctgcaggagcatgacaatccgttcacgctctatccttatgacaccaactacctcatttacacccaaaccagcgatctgaataaagaagcgattgccagttacgactgggcggaaaatgcgcgtaaggatgaagtaaagtttcagttgagcctggcatttccgctgtggcgtgggattttaggcccgaactcggtgttgggtgcgtcttatacgcaaaaatcctggtggcaactgtccaatagcgaagagtcttcaccgtttcgtgaaaccaactacgaaccgcaattgttcctcggttttgccaccgattactgttttgcaggttggacgctgcgcgatgtggagatggggtataaccacgactctaacgggcgttccgacccgacctcccgcagctggaaccgcctttatactcgcctgatggcagaaaacggtaactggctggtagaagtgaagccgtggtatgtggtgggtaatactgacgataacccggatatcaccaaatatatgggttactaccagcttaaaatcggctatcacctcggtgatgcggtgttgagtgcgaaaggacagtacaactggaataccggttacggcggcgcggagttaggcttaagttacccgatcaccaaacatgtgcgcctttatactcaggtttacagcggctatggcgaatcgctcatcgactataacttcaaccagacccgtgtcggtgtaggagttatgctaaacgacttgttttgatgaacggttgagtggttggcaaatctggaacccagcatccaggattaccctctcagagactaaaagcattgcagtttctcgcgcaggcgctgaaaatagcgcctgtttttatttcaggcaatcggggtgaatgtggcgcaggcggaagtgttgaatctggagtccggagctaaacaggttttacaagaaacctttggctaccaacagtttcgccccggccaggaagaaattatcgacactgtgctttccggtcgcgattgcctggtcgtcatgcccaccggtggcggaaaatccctttgctatcaaattcctgccttattgctaaacggccttaccgtggttgtttcaccgctgatttcgttgatgaaagatcaggtggatcaactgcaagccaacggcgtggcggcggcgtgccttaactcgacgcaaacccgcgagcagcaacttgaagtgatgacaggctgccgcaccgggcaaattcgtctgctttatatcgccccggaacgcctgatgctggataactttcttgagcatctggcgcactggaatccggtgttattagccgttgatgaagcgcactgtatctcccaatggggccacgatttccgcccggaatatgccgcgcttggtcagttacgccagcgtttcccgaccctgccgtttatggcgctgactgccacagccgacgacaccacgcgccaggatatcgtgcgcttgctggggctgaacgatccgctgattcaaatcagcagttttgaccgtccgaatattcgctacatgctgatggagaaattcaaaccgctcgatcagttgatgcgctacgtgcaggaacagcgcggtaagtccggcattatctactgcaacagccgggcgaaagtagaagacaccgctgcgcgcctgcaaagcaagggtattagcgcggcggcctatcatgccgggctggaaaataatgtccgcgccgacgtgcaggagaaattccagcgcgatgacctgcaaattgtggtggcgacggtggcgttcggcatgggcatcaataaaccaaacgttcgcttcgtggtccactttgatattccgcgcaatatcgaatcctattatcaggaaaccggtcgcgccgggcgtgatggcctgcctgcggaagcgatgctgttttacgatccggctgatatggcgtggctgcgccgttgtctggaagagaagccgcaggggcagttgcaggatattgagcgccacaaactcaatgcgatgggcgcgtttgccgaagcgcaaacttgccgtcgtctggtattgctgaactattttggcgaagggcgtcaggagccgtgcgggaactgcgatatctgcctcgatccgccgaaacagtacgacggttcaaccgatgctcagattgccctttccaccattggtcgtgtgaatcagcggtttgggatgggttatgtggtggaagtgattcgtggtgctaataaccagcgtatccgcgactatggtcatgacaaactgaaagtctatggcatgggccgtgataaaagccatgaacattgggtgagcgtgatccgccagctgattcacctcggcctggtgacgcaaaatattgcccagcattctgccctacaactgacagaggccgcgcgcccggtgctgcgcggcgaatcctctttgcaacttgccgtgccgcgtatcgtggcgctcaaaccgaaagcgatgcagaaatcgttcggcggcaactatgatcgcaaactgttcgccaaattacgcaaactgcgtaaatcgattgccgatgaaagtaatgtcccgccgtacgtggtgtttaacgacgcaaccttgattgagatggctgaacagatgccgatcaccgccagcgaaatgctcagcgttaacggcgttgggatgcgcaagctggaacgctttggtaaaccgtttatggcgctgattcgtgcgcatgtcgatggcgacgacgaagagtagtcagcagcataaaaaagtgccaggatgaagactccgtaaacgtttcccccgcgagtcaaatgtatgttgatgttatttctcaccgtcgccatggtgcacattgtggcgcttatgagccccggtcccgatttcttttttgtctctcagaccgctgtcagtcgttcccgtaaagaagcgatgatgggcgtgctgggcattacctgcggtgtaatggtttgggctgggattgcgttgcttggcctgcatttgattatcgaaaaaatggcctggctgcatacgcttatggttggcggtggcctgtatctctgctggatgggttaccagatgctgcgcggcgcgctgaaaaaagaggcggtttctgcacctgcgccacaggtcgagctggcgaaaagtgggcgcagtttcctgaaaggtttactgaccaatctcgctaatccgaaagcgattatctactttggctcggtgttctcattgtttgtcggtgataacgttggcactaccgcgcgctggggcatttttgcgctgatcattgtcgaaacgctggcgtggtttatcgtcgttgccagcctgtttgccctgccgcaaatgcgccgtggttatcaacgtctggcgaagtggattgatggttttgccggggcgttatttgccggatttggcattcatttgattatttcgcggtgatgccagacgcgtcttcagagtaagtcggataaggcgtttacgccgcatccgacattatttttcacgcatgcctcgccgatgctaacagcgctcccaccagcataaacaacgagccgaaaatcttattcagcgccttcatctgctttggtcctttaatccatagagcaatccgttgagcaagggtggcgtaaccgatcatcacaataatatcgaccacaatagtggtgacgccgagcacgatatactgcatcagttgcggctgttgcggcatgatgaattgcggaaatagcgccgccagaaacacaatacttttgggattggtgagattcacaaaaactgcgcgctggaacaaatgtcgacgcgattgagtagaggccagcgatttaaggtcaattgcaccagcggcgcgccactgctggattcccagccaaatcaagtaagccgcgcctgcccacttcaacacttcaaacgcaatcactgagcgggaaaatagcgtccccaaccccacgccaaccagcacaatatgaatcgccagtccggtctgaagcccagcaatagacgccaccgcgccgcgataaccgtggttgagcgaggtggtcatagtgttgattgcaccagagcctggcgacaggcttaaaatgatcgatgtcagcaggtaggcaaaccaccattctaaggtcatgatgaactcccggtgtgtctatttttgtgccacaatacgctactgtcgcagcgttgtgtcaggcacgctaaaaaaaacgattttacgtggtttaagaggcagattacccgatgtttcagcagcaaaaagactgggaaacaagagaaaacgcgtttgctgcttttaccatgggaccgctgactgatttctggcgtcagcgtgatgaagcagagtttactggtgtggatgacattccggtgcgctttgtccgttttcgcgcacagcaccatgaccgggtggtagtcatctgcccggggcgtattgagagctacgtaaaatatgcggaactggcctatgacctgttccatttggggtttgatgtcttaatcatcgaccatcgcgggcagggacgttccggtcgcctgttagccgatccgcatctcgggcatgttaatcgctttaatgattatgttgatgatctggcggcattctggcagcaggaggttcagcccggtccgtggcgtaaacgctatatactggcacattcgatgggcggtgcgatctccacattatttctgcaacgccatccaggtgtatgtgacgccattgcgctaactgcgccaatgtttgggatcgtgattcgtatgccgtcatttatggcacggcagatcctcaactgggccgaagcgcatccacgtttccgtgatggctatgcaataggcaccgggcgctggcgcgcgttgccgtttgctatcaacgtactgacccacagcagacagcgatatcgacgtaacttacgcttctatgctgatgacccaacgattcgcgtcggtgggccgacctaccattgggtacgcgaaagtattctggctggcgaacaggtgttagccggtgcgggtgatgacgccacgccaacgcttctcttgcaggctgaagaggaacgcgtggtggataaccgcatgcatgaccgtttttgtgaactccgcaccgccgcgggccatcctgtcgaaggaggacgaccgttggtaattaaaggtgcttaccatgagatcctttttgaaaaggacgcaatgcgctcagtcgcgctccacgccattgttgattttttcaacaggcataactcacccagcggaaaccgctctacagaggtttaaatttcttatgtaccaggttgttgcgtctgatttagatggcacgttactttctcccgaccatacgttatccccttacgccaaagaaaccctgaagctgctcaccgcgcgcggcatcaactttgtgtttgcgaccggtcgtcaccacgttgatgtggggcaaattcgcgataatctggagatcaagtcgtacatgatcacctccaacggcgcgcgcgttcacgatctggatggcaatctgatttttgctcataacctggatcgcgacattgccagcgatctgtttggcgtagtcaacgacaatctggacatcattactaacgtttatcgcgacgacgaatggtttatgaatcgccatcgcccggaagagatgcgcttttttaaagaagcggtgttcaaatatgcgctgtatgagcctggattactggagccggaaggcgtcagcaaagtgttcttcacctgcgattcccatgaacaactgctgccgctggagcaggcgattaacgctcgttggggcgatcgcgtcaacgttagtttctctaccttaacctgtctggaagtgatggcgggcggcgtttcaaaaggccatgcgctggaagcggtggcgaagaaactgggctacagcctgaaggattgtattgcgtttggtgacgggatgaacgatgccgaaatgctgtcgatggcggggaaaggctgcattatgggcagtgcgcaccagcgtctgaaagaccttcatcccgagctggaagtgattggtactaatgccgacgacgcggtgccgcattatctgcgtaaactctatttatcgtaatcgttctttatttggtcagttgtcaacctgatacttcgctacaatggatactcgttaatcaaagagttttccattgtggcgctacttatcatcaccacgattctgtgggccttctcctttagcttttatggcgagtaccttgcggggcacgtcgatagctattttgcggtgctggtgcgcgttggcctggcggcactcgtttttctgccgtttctgcgtacccgtggcaatagcctgaaaacggtcggcctgtatatgctggtgggcgcgatgcagctcggcgtgatgtatatgctgagtttccgcgcttatctctacctgacggtctccgaattgttgctgttcaccgtactgacgccgctctacatcacgctgatttatgacatcatgagtaagcgccgtctgcgctggggctatgcttttagcgccttgctggcggtgattggtgccgggattattcgctatgatcaggttaccgaccatttctggactggcttgttgctggtgcaactctccaatatcacttttgccatcggcatggtgggttacaaacgcctgatggaaactcgcccgatgccgcagcataacgcctttgcgtggttctatcttggcgcgttcctggtggcggtaattgcatggttcttgctgggaaatgcgcagaaaatgccgcaaaccacgttgcaatggggcattctggtgtttcttggcgtggtggcttccgggattggctactttatgtggaactacggcgcgacgcaggtggacgccggaacgctgggcattatgaataatatgcacgttccggcagggctgctggtaaacctggctatctggcaccaacagccgcactggccaacgttcattacaggcgcgctggtgatcctggcctcactgtgggtgcatcgtaagtgggtcgctccgcgctcttcacaaacggcagatgatcgcaggcgtgattgcgcgctgagcgaataaatgcttctgtaatcggctgacgctgctcgccatcgcgcacggcggcgtacagtcggctccacaagccttcgcccagggttttggtcaccaccagaccctggcgctcaaaactctctactacccaatgcggtagcgcggcaatacccatccgcgcggcaaccatctgaatcaacaataaggtgttatcgacgcttttcagtgacgggctgacgcctgccggctgaagaaaatgccgccagacatccagtcgactacgctgcaccggataaatcaacagcgtctcgctggcgagatcttccggtgtaattcgcgttttcgccgccagtggatggtcaggtgctaacaccagacgcacttcatagtcgaacatcggcgaataatgcaggccactgcgcggcaggatatcggaggtcatcaccagatccagctcgccctgttgcaacgcaggctgcgggtcaaacgtcacgcccgatttaaaatccatctctacctgcggccagttcttatggaaattttctaacgcgggcgtcagccactgaatacagctatggcactcaatggcaatgcgcagacgcgtctgctgcggttcattgcaggcttgcagtgcctggctgatttgcggcagcacctggtttgccagttgcaacaggatttctccctgcggtgtaaagcgtagcggctggctcttacgcacaaatagccggaagccaaggcgttgttccagatcgctaaactggtgagacagggcggattgcgtctgatgcaacgtcgccgcagcggctgcgagagagccgcagttccgcaacgcttgtagcgttttcaggtgttttacttcgatcatgaaagtccttcacttcggcatgaataatttgcgcttgaggaatatacagtaaccgccaattatggatgtgtaaacatctggacggctaaaatccttcgtcttttaaatttatggtgcgttggctgcgtttctccaccccggtcacttacttcagtaagctcccggggatgaataaacttgccgccttccctaaattcaaaatccataggatttacatataattagaggaagaaaaatgacaatattgaatcacaccctcggtttccctcgcgttggcctgcgtcgcgagctgaaaaaagcgcaagaaagttattgggcggggaactccacgcgtgaagaactgctgacagtagggcgtgaactgcgtgctcgtcactgggatcaacaaaagcaagcgggtatcgacctgctgccggtgggcgattttgcctggtacgatcatgtactgaccaccagtttgctgctgggtaatgttccgccacgtcatcagaacaaagacggttcggtagatatcgacaccctgttccgtattggtcgtggacgtgcgccgactggcgaacctgcggcggcagcggaaatgaccaaatggtttaacaccaactatcactacatggtgccggagttcgttaaaggccaacagttcaaactgacctggacgcagctgctggaggaagtggacgaggcgctggcgctgggccacaacgttaagcctgtgctgctggggccggttacttacctgtggctggggaaagtgaaaggtgaacagtttgaccgccttagcctgctgaacgacattctgccggtttatcagcaagtgctggcagaactggcgaaacgcggcatcgagtgggtacagattgatgaacccgcgctggtactggaactaccacaggcgtggctggacgcatacaaacccgcttacgacgcgctccagggacaggtgaaactgctgctgaccacctattttgaaggcgtaacgccaaatctcgacacgattactgcgctgcctgttcagggtctgcatgttgatctcgtacatggtaaagatgacgttgctgaactgcacaagcgcctgccttctgactggttgctgtctgcgggtctgatcaatggtcgtaacgtctggcgcgccgatcttaccgagaaatatgcgcaaattaaggacattgtcggcaaacgtgatttgtgggtggcatcttcctgctcgttgctgcacagccccatcgacctgagcgtggaaacgcgtcttgatgcagaagtgaaaagctggtttgccttcgccctacaaaaatgccatgaactagcactgctgcgcgatgcgctgaacagtggtgacacggcagctctggcagagtggagcgccccaattcaggcgcgtcgtcactctactcgtgtacataatccggcggtagaaaagcgtctggcggcgatcaccgcccaggacagccagcgtgcgaatgtctatgaagtgcgtgctgaagcccagcgtgcacgttttaaactgccagcgtggccgaccaccacgattggttccttcccgcaaaccacggaaattcgtaccctgcgtctggatttcaaaaagggcaatctcgacgccaataactaccgcacgggcattgcggaacatatcaggcaggccattgttgaacaggaacgtttgggactggatgtgctggtacatggcgaggccgagcgtaatgacatggtggaatactttggcgagcacctcgacgggtttgtctttacgcaaaacggttgggtacagagctacggttcccgctgcgtgaagccaccgattgttattggtgacgttagtcgcccggcaccgattaccgtggagtgggcgaagtatgcgcaatctctgactgataaaccggtgaaagggatgctgactggcccggtgactattctctgctggtcgttcccgcgtgaagatgtcagccgtgaaaccatcgccaaacagattgcgctggcgctgcgtgatgaagtggccgatctggaagccgctggaattggcatcatccagattgacgaaccggctctgcgcgaaggtttaccgctgcgtcgtagcgactgggatgcgtatctccagtggggcgtagaggccttccgtatcaacgccgccgtggcgaaagatgacacacaaatccacactcacatgtgttattgcgagttcaacgacatcatggattcgattgcggcactggacgcagacgtcatcaccatcgaaacctcgcgttctgacatggagttgctggagtcgttcgaagagtttgattatccgaatgaaatcggtccaggcgtctatgacattcactcgccaaacgtaccgagcgtggaatggattgaagccttgctgaagaaagcggcaaaacgcattccggcagagcgcctgtgggttaacccggactgtggcctgaaaacgcgcggctggccagaaacccgcgcggcactggcgaacatggtgcaggcggcgcagaatttgcgtcggggatgatgaatattaacgagtcactgtaaattgcagtacgatgaaagaggcaaaactgcctgatactaggcctacataatttatgcaatttattgaatttttgggttttgttggccggacaaggcgttcacgccgcatccggcatgaacaacgcgcactttgccaataatctgatggcttccatcaccggaagccattttgctatctgcgcccgttcagatacagaaataaccgaatcatttttacgcaaaatataatcctgagcgatttgttcagtaatcaacgctacgttatttattctcacttttcacgaaattgtatcccttttcagtaacgtggtagtgaggcatagacttatgtccgctatcctcaataataaccaaaccctcgttagctaatttgttaacaatgttaacaacattaccgaatcctggaatttgccttatggatagtgtgcgatcgagattcatccagttccagtttatatctttctcagccataattttcagtacgttaatttcagtttcagttatcatagtcaagtgcatcctggtggtataagtcattaagttctcccttaagtttataatcttctagagtagcagtatgcgtatgtagactggccccctgaatctccagacaaccagtatcacttaaataagtgatagtcttaatactagtttttagactagtcattggagtacagatgattgatgtcttagggccggagaaacgcagacggcgtaccacacaggaaaagatcgcaattgttcagcagagctttgaaccggggatgacggtctccctcgttgcccggcaacatggtgtagcagccagccagttatttctctggcgtaagcaataccaggaaggaagtcttactgctgtcgccgccggagaacaggttgttcctgcctctgaacttgctgccgccatgaagcagattaaagaactccagcgcctgctcggcaagaaaacgatggaaaatgaactcctcaaagaagccgttgaatatggacgggcaaaaaagtggatagcgcacgcgcccttattgcccggggatggggagtaagcttagtcagccgttgtctccgggtgtcgcgtgcgcagttgcacgtcattctcagacgaaccgatgactggatggatggccgccgcagtcgtcacactgatgatacggatgtgcttctccgtatacaccatgttatcggagagctgcccacgtatggttatcgtcgggtatgggcgctgcttcgcagacaggcagaacttgatggtatgcctgcgatcaatgccaaacgtgtttaccggatcatgcgccagaatgcgctgttgcttgagcgaaaacctgctgtaccgccatcgaaacgggcacatacaggcagagtggccgtgaaagaaagcaatcagcgatggtgctctgacgggttcgagttctgctgtgataacggagagagactgcgtgtcacgttcgcgctggactgctgtgatcgtgaggcactgcactgggcggtgactaccggcggcttcaacagtgaaacagtacaggacgtcatgctgggagcggtggaacgccgcttcggcaacgatcttccgtcgtctccagtggagtggctgacggataatggttcatgctaccgggctaatgaaacacgccagttcgcccggatgttgggacttgaaccgaagaacacggcggtgcggagtccggagagtaacggaatagcagagagcttcgtgaaaacgataaagcgtgactacatcagtatcatgcccaaaccagacgggttaacggcagcaaagaaccttgcagaggcgttcgagcattataacgaatggcatccgcatagtgcgctgggttatcgctcgccacgggaatatctgtggcagcgggcttgtaatgggttaagtgataacagatgtctggaaatataggggcaaatccagtatgattccagagtgcatagcctgcgtcaccatcaggttgtcctgtttcccaaccaagattacagtaacgctgatattcccgacactcatgagtatagaagttaagatctacttgttctggggggatttttcctttctcaatgtctttcagtctattgatcatcacttcatttacaggatcatgaccaaatctggctatatgtttttcaacaatagcgataccttccctgttgattgttacgccatctgtcgtcaggttttctattggaccaccggcaagctcgggattaaatggtcttcctgatactgctcctctggctccgaaatgctcaagtgattccaaatcagggagtctcattctccccagaactgctccagcaactattgaagcaccagcgatgagtaaccctttgttatccataaattgatcataaccagcaggtgcatctccccccaacttgtctgctgtttccctgaatccttcgatattcccattgtatatgccgacagcagcaagcagtctgccaaccgctttactattaagtgttttgaaaccattaccagctttagtttttggccgtggtataaacagacggttgtagttatcgggaaatgcccaataactaaattcagtattagcaatcagatgcctggagagtatatattaataactgacagtgatggcttctgtatccagattgttctcagtaaacaggtgattgattgctgataagagcgcgccgcggagttgaatgttgtaatatttctcccatcgaccaaacctattgatccgatagaagtcaaactccatgaacaactgctcgttattgttaatagcgttaataagtaacggggagcttttgtcaatcaatttacagaaactaaggccatgcaattatgaccctttgcctgtattcgtaatactattagagagcgagaacgcgaagatttcatcatcatggccaatctgccagcgattacctattgatgcgctcgttccacaacgagaggaaatacatccttgttgttctccggttatggtcaggtaaataatatcactcatccttgaaaaaccttttgttaattcttttgtgaaagagaaatagtattgttgttttttttacctttatttacgcctaaaagtgatgaactaaaatgtgaaaaacaaaatgtttcactttaatatctttttatcaggaaggtctgagatgatttataattaatgtgaatgtgttgataataattaatgtttgtttgtgaatgggagttgatggtaaatctctaaggtgtcttccattgaagagactcatttatgactatgacttgccgactttcttaaggtcaaatagcggagtcgtaatctccaatcaattcatactgattattttttgggggacagagatggcagcaaaacgcactcgtttactcaccatctcaaatatagactaagaggaaactaactccgcttctctccatactgcttaaaccattccagcatacgctgccagccatctttcgcagattcggcatgatagctcgggcgataatcagcgttgaatgcatgcccggcatccgggtacacgataatctctgctttcgcattagcagcccgcagcgcctggcgcatggtttcaacgctctcctgcggaatgctgttatcctgaccgccatataagccgagaatcggcgcgttaagatcggttgcgatatcaacaggttgtttcggtgaattcagcgacttgtcgcccgtcagtttgccgtaccacgccactgcagcttttagctgtggattatgcgcggcatacagccaggtgatacgtccaccccagcagaatccggtgatcattaaacgatgaacatcgccgccgttgcgggaagcccaactggcggcatgatcgagatcggccagcacctgcgagtcaggcacttttgctaccagaccgctaagcaacgtggggatatcggcaaaatcattcggatcgccttcgcggaagtaaagttcaggtgcgatagccagatacccctccagcgccagacggcgacaaatgtcgcggatatgttcatgcacgccaaaaatttcctgcactacaatgaccactggcagtgggccatcgctttgctttggtctggcatggtaagcaggcatgttatccccttgtgaagggatagaggtgaagcccgccacaatcgcgtcgtccagggtctgaacgatggtcgaagcgagaggcgatgcagcaggtgcaaatccagattgttgtgttgttgccatggtattctccgtacccttataaaaatgttgcgcaatgttaactatagtcagcatgcaacaaatcacattgcctgaatcggctcatcttttatgcagtcctgcagaatgaagagtgatttatgtgatttgaatcacttttggtgggtaaatttatgcaacgcatttgcgtcatggtgatgagtatcacgaaaaaatgttaaacccttcggtaaagtgtctttttgcttcttctgactaaaccgattcacagaggagttgtatatgtccaagtctgatgtttttcatctcggcctcactaaaaacgatttacaaggggctacgcttgccatcgtccctggcgacccggatcgtgtggaaaagatcgccgcgctgatggataagccggttaagctggcatctcaccgcgaattcactacctggcgtgcagagctggatggtaaacctgttatcgtctgctctaccggtatcggcggcccgtctacctctattgctgttgaagagctggcacagctgggcattcgcaccttcctgcgtatcggtacaacgggcgctattcagccgcatattaatgtgggtgatgtcctggttaccacggcgtctgtccgtctggatggcgcgagcctgcacttcgcaccgctggaattcccggctgtcgctgatttcgaatgtacgactgcgctggttgaagctgcgaaatccattggcgcgacaactcacgttggcgtgacagcttcttctgataccttctacccaggtcaggaacgttacgatacttactctggtcgcgtagttcgtcactttaaaggttctatggaagagtggcaggcgatgggcataatgaactatgaaatggaatctgcaaccctgctgaccatgtgtgcaagtcagggcctgcgtgccggtatggtagcgggtgttatcgttaaccgcacccagcaagagatcccgaatgctgagacgatgaaacaaactgaaagccaagcggtgaaaatcgtggtggaagcggcgcgtcgtctgctgtaattctcttctcctgtctgaaggccgacgcgttcggccttttgtatttttgcgtagcgcctcgcaggaaatgcctttccaactggacgtttgtacagcacaattctattttgtgcgggtaagttgttgcgtcaggaggcgttgtggatttctcaatcatggtttacgcagttattgcgttggtgggtgtggcaattggctggctgtttgccagttatcaacatgcgcagcaaaaagccgagcaattagctgaacgtgaagagatggtcgcggagttaagcgcggcaaaacaacaaattacccaaagcgagcactggcgtgcagagtgcgagttactcaataacgaagtgcgcagcctgcaaagtattaacacctctctggaggccgatctgcgtgaagtaaccacgcggatggaagccgcacagcaacatgctgacgataaaattcgccagatgattaacagcgagcagcgcctcagtgagcagtttgaaaacctcgccaaccgtatttttgagcacagcaatcgccgggttgatgagcaaaaccgtcagagtctgaacagcctgttgtcgccgctacgtgaacaactggacggtttccgccgtcaggttcaggacagcttcggtaaagaagcacaagaacgccataccctgacccacgaaattcgcaatctccagcaactcaacgcgcaaatggcccaggaagcgatcaacctgacgcgcgcgctgaaaggcgacaataaaacccagggcaactggggcgaggtagtattgacgcgggtgctggaggcttccggtctgcgtgaagggtatgaatatgaaacccaggtcagcatcgaaaatgacgcccgctcgcggatgcagccggatgtcatcgtgcggctgccgcagggaaaagatgtggtgatcgacgccaaaatgacgctggtcgcctatgaacgctattttaacgccgaagacgactacacccgcgaaagcgcgctacaggaacatatcgcgtcggtgcgtaaccatatccgtttgctgggacgcaaagattatcaacagctgccggggctgcgaactctggattacgtgctgatgtttattcccgttgaacccgcttttttactggcgcttgaccgccagccggagctgatcaccgaagcgttgaaaaacaatatcatgctggttagcccgactacgctgctggtggcgttgcgtactattgccaacctgtggcgttatgagcatcaaagccgcaacgcccagcaaatcgccgatcgtgccagcaagctgtacgacaagatgcgtttgttcatcgatgacatgtccgcgattggtcaaagtctcgacaaagcgcaggataactaccgccaggcaatgaaaaaactctcttcaggtcgcggaaatgtgctggcgcaggcagaagcgtttcgcggtttaggagtagaaattaaacgcgagattaatccggatttggctgaacaggcggtgagccagaatgaagagtatcgacttcggtcggttccggagcagccgaatgatgaagcttatcaacgcgatgatgaatataatcagcagtcgcgctagcccattaggggtagttaagccgggtagaaatctagggcatcgacgcccaatctgttacacttctggaacaattttttgatgagcaggcattgagatggtggataagtcacaagaaacgacgcactttggttttcagaccgtcgcgaaggaacaaaaagcggatatggtcgcccacgttttccattccgtggcatcaaaatacgatgtcatgaatgatttgatgtcatttggtattcatcgtttgtggaagcgattcacgattgattgcagcggcgtacgccgtgggcagaccgtgctggatctggctggtggcaccggcgacctgacagcgaaattctcccgcctggtcggagaaactggcaaagtggtccttgctgatatcaatgaatccatgctcaaaatgggacgcgagaagctgcgtaatatcggtgtgattggcaacgttgagtatgttcaggcgaacgctgaggcgctgccgttcccggataacacctttgattgcatcaccatttcgtttggtctgcgtaacgtcaccgacaaagataaagcactgcgttcaatgtatcgcgtgctgaaacccggcggccgcctgctggtgcttgagttctcgaagccaattatcgagccgctgagcaaagcctatgatgcatactccttccatgtgctgccgcgtattggctcactggtcgcgaacgacgccgacagctaccgttatctggcagaatccatccgtatgcatcccgatcaggataccctgaaagccatgatgcaggatgccggattcgaaagtgtcgactactacaatctgacggcaggggttgtggcgctgcatcgtggttataagttctgacaggagaccggaaatgccttttaaacctttagtgacggcaggaattgaaagtctgctcaacaccttcctgtatcgctcacccgcgctgaaaacagcccgctcgcgtctgctgggtaaagtattgcgcgtggaggtaaaaggcttttcgacgtcattgattctggtgttcagcgaacgccaggttgatgtactgggcgaatgggcaggcgatgctgactgcaccgttatcgcctacgccagtgtgttgccgaaacttcgcgatcgccagcagcttaccgcactgattcgcagtggtgagctggaagtgcagggcgatattcaggtggtgcaaaacttcgttgcgctggcagatctggcagagttcgaccctgcggaactgctggccccttataccggtgatatcgccgctgaaggaatcagcaaagccatgcgcggaggcgcaaagttcctgcatcacggcattaagcgccagcaacgttatgtggcggaagccattactgaagagtggcgtatggcacccggtccgcttgaagtggcctggtttgcggaagagacggctgccgtcgagcgtgctgttgatgccctgaccaaacggctggaaaaactggaggctaaatgacgccaggtgaagtacggcgcctatatttcatcattcgcacttttttaagctacggacttgatgaactgatccccaaaatgcgtatcaccctgccgctacggctatggcgatactcattattctggatgccaaatcggcataaagacaaacttttaggtgagcgactacgactggccctgcaagaactggggccggtttggatcaagttcgggcaaatgttatcaacccgccgcgatctttttccaccgcatattgccgatcagctggcgttattgcaggacaaagttgctccgtttgatggcaagctggcgaagcagcagattgaagctgcaatgggcggcttgccggtagaagcgtggtttgacgattttgaaatcaagccactggcttctgcttctatcgcccaggttcataccgcgcgattgaaatcgaatggtaaagaggtggtgattaaagtcatccgcccggatattttgccggttattaaagcggatctgaaacttatctaccgtctggctcgctgggtgccgcgtttgctgccggatggtcgccgtctgcgcccaaccgaagtggtgcgcgagtacgaaaagaccttgattgatgaactgaatttgctgcgggaatctgccaacgccattcagcttcggcgaaattttgaagacagcccgatgctctacatcccggaagtttaccctgactattgtagtgaagggatgatggtgatggagcgcatttacggcattccggtgtctgatgttgcgacgctggagaaaaatggcaccaacatgaaattgctggcggaacgtggcgtgcaggtgttcttcactcaggtctttcgcgacagctttttccatgccgatatgcaccctggcaacattttcgtaagctatgaacacccggaaaacccgaaatatatcggcattgattgcgggattgttggctcgctaaacaaagaagataaacgctatctggcagaaaactttatcgccttctttaatcgcgactatcgcaaagtggcagagctacacgtcgattctggctgggtgccaccagataccaacgttgaagagttcgaatttgccattcgtacggtctgtgaacctatctttgagaaaccgctggccgaaatttcgtttggacatgtactgttaaatctgtttaatacggcgcgtcgcttcaatatggaagtgcagccgcaactggtgttactccagaaaaccctgctctatgtcgaaggggtaggacgccagctttatccgcagctcgatttatggaaaacagcgaagcctttcctggagtcgtggattaaagatcaggtcggtattcctgccctggtgagagcatttaaagaaaaagcgccgttctgggtcgaaaaaatgccagaactgcctgaattggtttacgacagtttgcgccagggcaagtatttacagcacagtgttgataagattgcccgcgagcttcagtcaaatcatgtacgtcagggacaatcgcgttattttctcggaattggcgctacgttagtattaagtggcacattcttgttggtcagccgacctgaatgggggctgatgcccggctggttaatggcaggtggtctgatcgcctggtttgtcggttggcgcaaaacacgctgattttttcatcgctcaaggcgggtcgtgtaacgtataatgcggccttgtttaatcatcatctaccacagaggaacatgtatgggtggtatcagtatttggcagttattgattattgccgtcatcgttgtactgctttttggcaccaaaaagctcggctccatcggttccgatcttggtgcgtcgatcaaaggctttaaaaaagcaatgagcgatgatgaaccaaagcaggataaaaccagtcaggatgctgattttactgcgaaaactatcgccgataagcaggcggatacgaatcaggaacaggctaaaacagaagacgcgaagcgccacgataaagagcaggtgtaatccgtgtttgatatcggttttagcgaactgctattggtgttcatcatcggcctcgtcgttctggggccgcaacgactgcctgtggcggtaaaaacggtagcgggctggattcgcgcgttgcgttcactggcgacaacggtgcagaacgaactgacccaggagttaaaactccaggagtttcaggacagtctgaaaaaggttgaaaaggcgagcctcactaacctgacgcccgaactgaaagcgtcgatggatgaactacgccaggccgcggagtcgatgaagcgttcctacgttgcaaacgatcctgaaaaggcgagcgatgaagcgcacaccatccataacccggtggtgaaagataatgaagctgcgcatgagggcgtaacgcctgccgctgcacaaacgcaggccagttcgccggaacagaagccagaaaccacgccagagccggtggtaaaacctgctgcggacgctgaaccgaaaaccgctgcaccttccccttcgtcgagtgataaaccgtaaacatgtctgtagaagatactcaaccgcttatcacgcatctaattgagctgcgtaagcgtctgctgaactgcattatcgcggtgatcgtgatattcctgtgtctggtctatttcgccaatgacatctatcacctggtatccgcgccattgatcaagcagttgccgcaaggttcaacgatgatcgccaccgacgtggcctcgccgttctttacgccgatcaagctgacctttatggtgtcgctgattctgtcagcgccggtgattctctatcaggtgtgggcatttatcgccccagcgctgtataagcatgaacgtcgcctggtggtgccgctgctggtttccagctctctgctgttttatatcggcatggcattcgcctactttgtggtctttccgctggcatttggcttccttgccaataccgcgccggaaggggtgcaggtatccaccgacatcgccagctatttaagcttcgttatggcgctgtttatggcgtttggtgtctcctttgaagtgccggtggcaattgtgctgctgtgctggatggggattacctcgccagaagacttacgcaaaaaacgcccgtatgtgctggttggtgcattcgttgtcgggatgttgctgacgccgccggatgtcttctcgcaaacgctattggcgatcccgatgtactgtctgtttgaaatcggtgtcttcttctcacgcttttacgttggtaaagggcgaaatcgggaagaggaaaacgacgctgaagcagaaagcgaaaaaactgaagaataaattcaaccgcccgtcagggcggttgtcatatggagtacaggatgtttgatatcggcgttaatttgaccagttcgcaatttgcgaaagaccgtgatgatgttgtagcgcgcgcttttgacgcgggagttaatgggctactcatcaccggcactaacctgcgtgaaagccagcaggcgcaaaagctggcgcgtcagtattcgtcctgttggtcaacggcgggcgtacatcctcacgacagcagccagtggcaagctgcgactgaagaagcgattattgagctggccgcgcagccagaagtggtggcgattggtgaatgtggtctcgactttaaccgcaacttttcgacgccggaagagcaggaacgcgcttttgttgcccagctacgcattgccgcagatttaaacatgccggtatttatgcactgtcgcgatgcccacgagcggtttatgacattgctggagccgtggctggataaactgcctggtgcggttcttcattgctttaccggcacacgcgaagagatgcaggcgtgcgtggcgcatggaatttatatcggcattaccggttgggtttacgatgaacgacgcggactggagctgcgggaacttttgccgttgattccggcggaaaaattactgatcgaaactgatgcgccgtatctgctccctcgcgatctcacgccaaagccatcatcccggcgcaacgagccagcccatctgccccatattttgcaacgtattgcgcactggcgtggagaagatgccgcatggctggctgccaccacggatgctaatgtcaaaacacggtttgggattgcgttttagagtttgcggaactcggtgttcttcacactgtgcttaatctctttattaataagattaagcaatagcatggagcgagcctcaccatcgggttcggtgaaaatggcctgaaagccttcgaacgcgccttcggtaataatcaccttatctcccggataaggggttgccggatcgacaatgtctttcggtttatataccgatagctgatgaatcaccgccgatgggactatcgctagcgacgcgccaaagcgcacgaagtggctgacaccgcgggtcgcgttgatagtcgtggtatgaatcacttctggatcaaattcgacaaacaggtagttgggaaacaatggctcactgactgcagtacgttttccacgcacgattttttccagggtgatcatcggtgccaggcaattcacagcctgtctctcaaggtgttcctgggcacgttgaagttgcccgcgcttgcagtacagtaaataccaagattgcataatgactcttatccgtttaatcggggcgcaaggatagcaaaagctttacgctaagttaattatattccccggtttgcgttataccgtcagagttcacgctaatttaacaaatttacagcatcgcaaagatgaacgccgtataatgggcgtagattaagaggctacaatggacgccatgaaatataacgatttacgcgacttcttgacgctgcttgaacagcagggtgagctaaaacgtatcacgctcccggtggatccgcatctggaaatcactgaaattgctgaccgcactttgcgtgccggtgggcctgcgctgttgttcgaaaaccctaaaggctactcaatgccggtgctgtgcaacctgttcggtacgccaaagcgcgtggcgatgggcatggggcaggaagatgtttcggcgctgcgtgaagttggtaaattattggcgtttctgaaagagcccgagccgccaaaaggtttccgcgacctgtttgataaactgccgcagtttaagcaagtattgaacatgccgacaaagcggctgcgtggtgcgccctgccaacaaaaaatcgtctctggcgatgacgtcgatctcaatcgcattcccattatgacctgctggccggaagatgccgcgccgctgattacctgggggctgaccgtaacgcgcggcccgcataaagagcggcagaatctgggcatttatcgccagcagctgattggtaaaaacaaactgattatgcgctggctgtcgcatcgcggcggcgcgctggattatcaggagtggtgtgcggcgcatccgggcgaacgtttcccggtttctgtggcgctgggtgccgatcccgccacgattctcggtgcagtcacccccgttccggatacactttcagagtatgcgtttgccggattgctgcgcggtaccaagaccgaagtggtgaagtgtatctccaatgaccttgaagtgcccgccagtgcggagattgtgctggaagggtatatcgaacaaggcgaaactgcgccggaagggccgtatggcgaccacaccggttactataacgaagtcgatagtttcccggtatttaccgtgacgcatattacccagcgtgaagatgcgatttaccactccacctatactggtcgtccgccggatgaacccgcggtgctgggtgtcgcactgaacgaagtgtttgtgccgattctgcaaaaacagttcccggaaattgtcgatttttacctgccaccggaaggctgttcttatcgtctggcggtagtgacaatcaaaaaacagtacgccggacacgcgaagcgcgtcatgatgggcgtctggtcgttcttacgccagtttatgtacactaaatttgtgatcgtttgcgatgatgacgtcaacgcacgcgactggaacgatgtgatttgggcgattaccacccgtatggacccggcgcgggatactgttctggtagaaaatacgcctattgattatctggattttgcctcgcctgtctccgggctgggttcaaaaatggggctggatgccacgaataaatggccgggggaaacccagcgtgaatggggacgtcccatcaaaaaagatcctgatgtcgtcgcgcatattgacgccatctgggatgaactggctatttttaacaacggtaaaagcgcctgatgcgcgttagttttgccctatttatttgatccgacagagaaagcgcatgacaaccttaagctgtaaagtgacctcggtagaagctatcacggatactgtataccgtgtccgaatcgtaccagacgcggccttttcttttcgtgctggtcagtatttgatggtagtgatggatgagcgcgacaaacgtccgttttcaatggcttcgacgccggatgaaaaagggtttatcgagctgcatattggcgcttctgaaatcaacctttacgcgaaagcagtcatggaccgcatcctcaaagatcatcaaatcgtggtcgatattccccacggagaagcgtggctgcgcgatgatgaagagcgtccgatgattttgattgcgggcggcaccgggttctcctatgcgcgctcgattttattgacggcgttggcgcgtaatcccaatcgcgatatcaccatttactggggtgggcgtgaagagcaacatctgtatgatctctgcgagcttgaggcgctttcgctgaagcatcctggtctgcaagtggtgccggtggttgaacaaccggaagcgggctggcgtgggcgtactggcaccgtgttaacggcggtcttgcaggatcatggtacgctggcagagcatgatatctatattgccggacgttttgagatggcgaaaattgctcgtgacctgttttgcagtgagcgtaatgcgcgggaagatcgtctgtttggcgatgcgtttgcatttatctgagatataaaaacccgcccctgacaggcgggaagaacggcaactaaaactttattcagtggcatttagatctatgtcgcatccggcaatcggtgcacgatgcctgatgcgacgctggcgcgtcttatcaggcctacattggtgcaggatcggtagaccggataaggcgttcacgccgcatccggcaagtggttaaacccgctcaaacaccgtcgcaataccctgacccagaccgatacacatcgtcgccagaccaaactgaacgtctttgtgttccatcagattcagcaacgtggtgctgatacgcgcaccggaacaacccagcggatgacccagcgcgatcgcaccaccattgaggttgatcttctcgtcaatctgctccattagcccgagatctttaatgcacggcaggatctgcgcggcaaaggcttcgttcatctcaaacacgccgatatcgctggcagaaagccccgcttttttcagcgccagcttcgaggcaggaaccgggccgtaacccataatcgacggatcacaaccaacgaccgccatcgaacgcacacgggcgcgcggcttaagacctaattcacgggcgcggctttcactcatcaccagcatggccgcggcaccatcagaaagtgcagaagatgtacccgccgttaccgtaccgcttactggatcaaacgccggacgcagcgtggcgagggcttccacggtggtttccgggcgaatcacttcgtcgtaattaaactgcttcaggacgccgtcggcatcgtgaccaccggtcgggatgatttcatttttaaatgcgcccgactgcgtggcggcccaggcgcgggcgtgtgaccgcgcggcaaaggcatcctgcatttcacggctgataccgtgcatacgcgccagcatttctgccgttaagcccatcatgcccgccgctttggcgacattgcggctcaggccggggtgaaaatcgacgccgtgactcatcggcacatggcccatatgctccacgccgccaaccagacatgcctgcgcatcgccagtcatgatcattcgtgctgcgtcatgcagtgcctgcatggatgaaccacacaagcgattgacggtaaccgccgggacagagtgcggcacttctgccagcagcgccgcgttacgggcgatattaaaaccctgctccagcgtctgctgcacacaaccccagtaaatatcgtcgagggccgccgcttccagcgccgggttacgcgccagcaggctacgcattaaatgagcggagagatcttctgcacgcacgttacgaaaagcaccgcccttcgaacggcccatcggggtgcgaattgcatcgacaatgacaacctgttccattgtgactccttaagccgttttcaggtcgccaaccggacgggctggctcaaccggaggatagtacggttcgttatgacgcgctttattacgcagaccttccggcacttcatacagcgggccgaggtgctgatattgctgtgccatatcgaggtattttgcgctaccgagggtgtccagccagcggaacgcgccgccgtggaacggagggaagcccaggccgtagaccagcgccatatccgcttccgccggagtggcgataatgccctcttccagacagcgcaccacttcgttgaccatcgggatcatcatgcgggcgataatctcttcttcgctgaaatcgcgcttcggctggctcacttctgccagcaggtcttcaacggcggcgtcttcttctttcttcggcttacctttgctgtcttctttataacgccagaaaccgaggccgttcttctgaccaaagcggttggcatcaaacagcgcgtcgatggcatcgcggtaatctttttgcatccgctgcgggaagcctgctgccatgacagcctgagcgtgatgcgcggtatcaatgcccacaacgtccagcagatatgccgggcccatcggccagccaaactgtttttccatcactttgtcgatcttgcggaaatccgcgccgtcgcgcagcagctggctgaaaccggcgaaatacgggaacagcacgcggttaacaaagaagccggggcagtcgttaaccacaatcggcgtcttgcccatcttgctcgcccaggcgacaactttcgcgatggtttcgtcggagcttttctcgccgcgaataatttctaccaacggcattcggtggaccgggttaaagaagtgcatcccgcagaagttttccgggcgttccagcgcgttggccagttcgctgataggaatggttgaagtgttagacgccagcacggtatcctggcgtactttttgttcggtttctgccagtacggcttttttcactttcgggttttcaacaaccgcttctaccacaatatccacgcggtcaaatccggcgtagtcgagcgttgggtggatcgtggagatcacgccagccagtttcagaccatcgatcttgccgcgctcaagctgcttgttcagcagtttcgcggcttcggtcatgctgagggttaacgacttgtcgttgatatctttcatgacaaccggcacgcctttccacgcggactggtaagcgataccgccacccatgatgcctgcgcccagcacagcagcctgtttcggggtttcaacgtctttggtgagtttcttcgctttgccttttacatattgatcgttaaggaaaatgccgaccagtgcgcgagcttcgttggtatgcgccagcgggacaaaacttttgttttccagatttaaggcttcttcacgaccaaaacgggccgcagcttcaatggtttttactgcggtgatgggggccggataatgtttccccgccgtttgcgcgaccattcctttagcgatggtgaagctcatggtggcttcaatcttgctcagttttagcggttccagcttcggctggcgtttcgctttccagtcgaggtcgccgttaatggcctggcgtaaaaccgcctttgcgccttcaaccagtttttctgctttgactaccccatccaccagaccgattttcagcgcctgatccgcgccgacatctttaccggcggcaatgatttccagcgcactgtcagcgcccagcatacgtggcatacgtacagaaccgccaaagcccggcatgatgcccagtttggtttccggcagaccgatgcgcagatccggcgtcgccagacgataatcggtcgccagcacgcattcgcagccaccacccagcgcatagccgttgacggcagcaatggtcggcaccggcagatcttccaggcgattaaacacgctattggcaaagtgcagccactgacttaactgttcttcaggaacgaggaacagggacaaaaattcggtgatatcagcaccgacgataaaggctgctttgttcgaacgcagcagcagcccttttagatctgattgctgttccagcacgccgatggcctcgccgaggctggcgacggtcgcagtgtcgagtttattaactgaacctggggcatcaaataccagttcggcaatgccatcttccagccagtcaaggtacagggtgtcgcctttgtaaagcatgtcagtctcctgaatccgcaaggtgatctggtcgtaccagatgcatcgaagtgtgtattttgtgttaaaaatatgcaaataaaagattaaagaaatgccgatctgatcacgctcggcagaaatcacgctctggatgaacgatgtgctaagatgcggagacttaaggtcaaaaaaacagaagggtaaaaaatggaatcactggcctcgctctataaaaatcatatagctaccttacaagaacggactcgcgatgcgctggcgcgcttcaagctggatgcattacttattcactccggcgagctgttcaacgtttttctcgacgatcatccctatccgtttaaagtgaacccgcaattcaaagcgtgggtgccggtaactcaggtgccaaactgctggttgctggtggatggcgtgaacaagccgaaactgtggttctatctgccggttgattactggcacaacgtcgaaccgctgccgacctccttctggactgaagatgtggaagtgatcgcactgccgaaagccgatggcattggtagcctgctgcccgctgcgcgcggcaatatcggttatatcggtccggtgccggaacgtgcgctgcaactgggtattgaggccagcaacatcaacccgaaaggggtgatcgactacctgcattactaccgctccttcaaaaccgagtacgaactggcctgtatgcgtgaagcgcagaaaatggcggtcaacggtcatcgtgcggcagaagaagcgttccgttctggcatgagcgagttcgatatcaacatcgcctatctgaccgcgaccggtcatcgtgataccgacgtaccttacagcaacattgtggcgcttaacgaacacgcttcggtgctgcattacaccaaactggatcatcaggcaccggaagagatgcgcagcttcctgctggatgccggggccgaatataacggctatgcggctgacctgactcgtacctggtcggcaaaaagcgacaacgactacgcacagctggtgaaagacgtaaatgatgaacaactggcgctgatcgccaccatgaaagcaggcgttagctatgtggattaccacatccagttccatcagcgcatcgccaaactgctgcgtaaacatcaaatcatcaccgatatgagtgaagaagcgatggtcgaaaacgatctcaccggaccgtttatgccgcatggtatcggtcatccgctgggcctgcaggtgcatgacgtagccggttttatgcaggatgatagcggtacacacctcgcggcaccggcaaaatatccgtacctgcgctgcacccgtattctccagccgggtatggtgttaaccatcgaaccgggtatctacttcattgaatcgctactggcaccgtggcgtgaagggcagttcagcaagcacttcaactggcagaaaattgaagcactgaaaccgttcggcggcattcgtatcgaagacaacgtggtgatccacgaaaacaacgtggaaaacatgacccgggatctgaaactggcgtgatggaaagctggttaattcctgcggcaccggtcacggtcgttgaagagatcaaaaaaagccgcttcataacgatgttggcgcataccgatggcgttgaggcggcgaaagcgtttgttgaatcggtgcgggcagaacaccccgatgcccgccaccattgcgtggcgtgggtggcgggtgcgccggatgattctcaacagctgggtttctctgacgacggggagccggcaggaacggcaggtaaaccgatgctcgcccagctaatgggcagcggcgtcggggaaattaccgctgtggtagtgcgctactacggcggcatattgcttggcaccggtgggttagtgaaagcgtatggcggcggcgtgaatcaggcgctgcgccagctaacgacccaacgcaagacgccattaaccgaatatactttgcaatgtgaatatcatcagttaaccggcattgaagcgttgctggggcagtgtgacggcaaaattatcaacagtgattatcaggcattcgttctgctgcgggtggcgcttccggcggcgaaagtggctgaattttccgcaaagctggcggattttagccgtggttcattgcaattgttagcgattgaagaataatccccacttcgttttgcagaactaaggaagcggcagagatgcattttcgcgccattacccgaatcgttggactactggtcatcttattttcagggaccatgattatccctgggctggtagcactcatctaccgggatggagcgggccgcgcttttacccagaccttttttgtcgccctcgccattggttctatgctgtggtggccgaaccgtaaagagaagggcgaactgaaatcccgtgaggggtttctgatagtggtgctgttctggaccgtgctgggtagtgtcggtgcgctcccttttatcttctcggaaagcccgaacctcacgattaccgatgcgttttttgaatctttctctggcctgaccaccaccggggccactacgctggtggggctggattcgctccctcatgccatcctcttttatcgccagatgctgcaatggtttggcgggatggggatcatcgtgttagcggttgcgatactgcctatcctcggcgtgggtgggatgcagctctatcgcgcagaaatgcccggcccgctgaaagataacaaaatgcgcccgcgaattgcggaaacggcgaaaaccctgtggttgatttatgtcttgctgaccgtcgcctgtgcgctggcgttgtggtttgccggaatggatgcctttgatgccatcggccatagctttgcgactatcgctattggcggcttctcgacacatgatgccagtatcggttatttcgacagcccgactattaacactatcattgctatcttcctgctgatctccggctgtaactacggtctgcacttttcactgttaagtgggcgtagtctgaaggtttattggcgcgatccggaatttcgcatgtttatcggcgtacagtttacgctggtggttatttgtacactcgtactgtggtttcataatgtctacagttcggcgctgatgacaattaaccaggcgtttttccaggtggtatcgatggcgacaaccgccgggtttacgactgacagcattgcccgctggccgctctttttgccggtactgcttttatgttcagcttttatcggcggttgcgccgggtcaacgggcggtggcctgaaagtgatccgcatcctgctgctgtttaagcaggggaaccgtgagctgaaacgactggtgcatccgaacgccgtctatagcattaagctggggaatcgcgcactgccggaacgtatcctcgaagccgtttggggatttttctccgcctatgcattggtgtttattgtcagtatgctggcgattatcgccacgggcgtggatgacttttctgcctttgcttcagttgttgcgacattgaataacctggggccagggcttggcgtggttgctgataactttaccagtatgaacccggtggctaaatggatcctgattgccaacatgctgtttggtcgtctcgaggtctttacattgctggtgctctttaccccgactttctggcgtgaatgatggagtaatacgtgaaaacattaattcttttctcaacaagggacggacaaacgcgcgagattgcctcctacctggcttcggaactgaaagaactggggatccagacggatgtcgccaatgtgcaccgcattgaagaaccacaatgggaaaattatgaccgtgtggtcattggtgcttctattcgctatggtcactaccactctgcgttccaggaatttgtcaaaaaacatgcgacgcgactgaattcgatgccgagcgccttttattccgtaaacctggtggcgcgcaaaccggagaagcgtactccacagaccaacagctacgcgcggaagtttctgatgaactcgcaatggcgtcccgatcgctgcgcggtcattgccggggcgctgcgttacccacgttatcgctggtacgatcgttttatgatcaagctaattatgaagatgtcaggcggtgaaacggatacgcgcaaagaagttgtctataccgattgggagcaggtggcgaatttcgcccgagaaatcgcccagttaaccaacaaaccgacgctgaaataagcataaagaataaaaaatgcgcggtcagaaaattattttaaatttcctcttgtcaggccggaataactccctataatgcgccaccactgacacggaacaacggcaaacacgccgccgggtcagcggggttctcctgagaattccgacagagaaagcaaaaataaatgcttgactctgtagcgggaaagcgtattatgcacaccccgcgccgctgagaaaaagtgaagcggcactgctctttaacaatttatcagacaatctgtgtgggcactcgaagatacggattcttaacgtcgcaagacgaaaaatgaataccaagtctcaagagtggacacgtaattcattacgaagtttaattctttgagcatcaaacttttaaattgaagagtttgatcatggctcagattgaacgctggcggcaggcctaacacatgcaagtcgaacggtaacaggaagcagcttgctgcttcgctgacgagtggcggacgggtgagtaatgtctgggaaactgcctgatggagggggataactactggaaacggtagctaataccgcataacgtcgcaagaccaaagagggggaccttcgggcctcttgccatcggatgtgcccagatgggattagcttgttggtggggtaacggctcaccaaggcgacgatccctagctggtctgagaggatgaccagccacactggaactgagacacggtccagactcctacgggaggcagcagtggggaatattgcacaatgggcgcaagcctgatgcagccatgccgcgtgtatgaagaaggccttcgggttgtaaagtactttcagcggggaggaagggagtaaagttaatacctttgctcattgacgttacccgcagaagaagcaccggctaactccgtgccagcagccgcggtaatacggagggtgcaagcgttaatcggaattactgggcgtaaagcgcacgcaggcggtttgttaagtcagatgtgaaatccccgggctcaacctgggaactgcatctgatactggcaagcttgagtctcgtagaggggggtagaattccaggtgtagcggtgaaatgcgtagagatctggaggaataccggtggcgaaggcggccccctggacgaagactgacgctcaggtgcgaaagcgtggggagcaaacaggattagataccctggtagtccacgccgtaaacgatgtcgacttggaggttgtgcccttgaggcgtggcttccggagctaacgcgttaagtcgaccgcctggggagtacggccgcaaggttaaaactcaaatgaattgacgggggcccgcacaagcggtggagcatgtggtttaattcgatgcaacgcgaagaaccttacctggtcttgacatccacagaactttccagagatggattggtgccttcgggaactgtgagacaggtgctgcatggctgtcgtcagctcgtgttgtgaaatgttgggttaagtcccgcaacgagcgcaacccttatcctttgttgccagcggtccggccgggaactcaaaggagactgccagtgataaactggaggaaggtggggatgacgtcaagtcatcatggcccttacgaccagggctacacacgtgctacaatggcgcatacaaagagaagcgacctcgcgagagcaagcggacctcataaagtgcgtcgtagtccggattggagtctgcaactcgactccatgaagtcggaatcgctagtaatcgtggatcagaatgccacggtgaatacgttcccgggccttgtacacaccgcccgtcacaccatgggagtgggttgcaaaagaagtaggtagcttaaccttcgggagggcgcttaccactttgtgattcatgactggggtgaagtcgtaacaaggtaaccgtaggggaacctgcggttggatcacctccttaccttaaagaagcgttctttgcagtgctcacacagattgtctgatgaaaatgagcagtaaaacctctacaggcttgtagctcaggtggttagagcgcacccctgataagggtgaggtcggtggttcaagtccactcaggcctaccaaatttgcatcgcaaatttgaagaggttttaactacatgttatggggctatagctcagctgggagagcgcctgctttgcacgcaggaggtctgcggttcgatcccgcatagctccaccatctctgtagtgattaaataaaaaatacttcagagtgtacctgcaaaggttcactgcgaagttttgctctttaaaaatctggatcaagctgaaaattgaaacactgaacaatgaaagttgttcgtgagtctctcaaattttcgcaacacgatgatgaatcgcaagaaacatcttcgggttgtgaggttaagcgactaagcgtacacggtggatgccctggcagtcagaggcgatgaaggacgtgctaatctgcgataagcgtcggtaaggtgatatgaaccgttataaccggcgatttccgaatggggaaacccagtgtgattcgtcacactatcattaactgaatccataggttaatgaggcgaaccgggggaactgaaacatctaagtaccccgaggaaaagaaatcaaccgagattcccccagtagcggcgagcgaacggggagcagcccagagcctgaatcagtgtgtgtgttagtggaagcgtctggaaaggcgcgcgatacagggtgacagccccgtacacaaaaatgcacatattgtgagctcgatgagtagggcgggacacgtggtatcctgtctgaatatggggggcccatcctccaaggctaaatactcctgactgaccgatagtgaaccagtaccgtgagggaaaggcgaaaagaaccccggcgaggggagtgaaaaagaacctgaaaccgtgtacgtacaagcagtgggagcacgcttaggcgtgtgactgcgtaccttttgtataatgggtcagcgacttatattctgtagcaaggttaaccgaataggggagccgaagggaaaccgagtcttaactgggcgttaagttgcagggtatagacccgaaacccggtgatctagccatgggcaggttgaaggttgggtaacactaactggaggaccgaaccgactaatgttgaaaaattagcggatgacttgtggctgggggtgaaaggccaatcaaaccgggagatagctggttctccccgaaagctatttaggtagcgcctcgtgaattcatctccgggggtagagcactgtttcggcaagggggtcatcccgacttaccaacccgatgcaaactgcgaataccggagaatgttatcacgggagacacacggcgggtgctaacgtccgtcgtgaagagggaaacaacccagaccgccagctaaggtcccaaagtcatggttaagtgggaaacgatgtgggaaggcccagacagccaggatgttggcttagaagcagccatcatttaaagaaagcgtaatagctcactggtcgagtcggcctgcgcggaagatgtaacggggctaaaccatgcaccgaagctgcggcagcgacgcttatgcgttgttgggtaggggagcgttctgtaagcctgcgaaggtgtgctgtgaggcatgctggaggtatcagaagtgcgaatgctgacataagtaacgataaagcgggtgaaaagcccgctcgccggaagaccaagggttcctgtccaacgttaatcggggcagggtgagtcgacccctaaggcgaggccgaaaggcgtagtcgatgggaaacaggttaatattcctgtacttggtgttactgtgaaggggggacggagaaggctatgttggccgggcgacggttgtcccggtttaagcgtgtaggctggttttccaggcaaatccggaaaatcaaggctgaggcgtgatgacgaggcactacggtgctgaagcaacaaatgccctgcttccaggaaaagcctctaagcatcaggtaacatcaaatcgtaccccaaaccgacacaggtggtcaggtagagaataccaaggcgcttgagagaactcgggtgaaggaactaggcaaaatggtgccgtaacttcgggagaaggcacgctgatatgtaggtgaagtcccttgcggatggagctgaaatcagtcgaagataccagctggctgcaactgtttattaaaaacacagcactgtgcaaacacgaaagtggacgtatacggtgtgacgcctgcccggtgccggaaggttaattgatggggtcagcgcaagcgaagctcttgatcgaagccccggtaaacggcggccgtaactataacggtcctaaggtagcgaaattccttgtcgggtaagttccgacctgcacgaatggcgtaatgatggccaggctgtctccacccgagactcagtgaaattgaactcgctgtgaagatgcagtgtacccgcggcaagacggaaagaccccgtgaacctttactatagcttgacactgaacattgagccttgatgtgtaggataggtgggaggctttgaagtgtggacgccagtctgcatggagccggccttgaaataccaccctttaatgtttgatgttctaacgtggacccgtgatccgggttgcggacagtgtctggtgggtagtttgactggggcggtctcctcctaaagagtaacggaggagcacgaaggttggctaatcctggtcggacatcaggaggttagtgcaatggcataagccagcttgactgcgagcgtgacggcgcgagcaggtgcgaaagcaggtcatagtgatccggtggttctgaatggaagggccatcgctcaacggataaaaggtactccggggataacaggctgataccgcccaagagttcatatcgacggcggtgtttggcacctcgatgtcggctcatcacatcctggggctgaagtaggtcccaagggtatggctgttcgccatttaaagtggtacgcgagctgggtttagaacgtcgtgagacagttcggtccctatctgccgtgggcgctggagaactgaggggggctgctcctagtacgagaggaccggagtggacgcatcactggtgttcgggttgtcatgccaatggcactgcccggtagctaaatgcggaagagataagtgctgaaagcatctaagcacgaaacttgccccgagatgagttctccctgaccctttaagggtcctgaaggaacgttgaagacgacgacgttgataggccgggtgtgtaagcgcagcgatgcgttgagctaaccggtactaatgaaccgtgaggcttaaccttacaacgccgaagatgttttggcggatgagagaagattttcagcctgatacagattaaatcagaacgcagaagcggtctgataaaacagaatttgcctggcggccgtagcgcggtggtcccacctgaccccatgccgaactcagaagtgaaacgccgtagcgccgatggtagtgtggggtctccccatgcgagagtagggaactgccaggcatcaaattaagcgaaaggccatcctgacggatggcctttttgcattggcgcagaaaaaaatgccggatgcgacactggcgcgtcttatccagcctactcttgcttatccgttctgcttttgcatccactccaccacaaaatcagccagcccctcaacatcattaatatccagtaatgcgacatcaagattaagcggcacatcactggctacagcaataacatgcctgtctatcactaattcttcaggtcgatgtccggctccatcgcgaaacagcacaatctttgcgatctcttcatgcttaaacccttcgaccagaatcaaatccagctttgaggtatccattcgacttgcgagaaactgtagatccagctcttcttcgtctggtttttccgtcatcaaggcccatcgttgctggctggcaacgatggtttgtgccgcgccagccttgcgcagctcatagctatctttgcctggcttatcaacatccatatcatggtgcgtatgcttaatcagccctggacggatccctctggcgcataatgccgggatcagttttttcaaaagcgtagtttttccggtaccactccacgcggcaaaggcgagtaacggtatcatcgtttttcctgccatcgggcaagctcctctggcgtattcacgttaacaaatgcatctttatgatcgctgaaatcaaccgcatggccgccagccagacgcataaatgccattacccggcgttctcctgcttgcagatattctagtaataaaggctcaatagcacggtttaccagagcaatagtcgggtgatcgcgttcaccgtcatggacccacacgacaggcgcatctttgcgctgatgattaagccgggaagctaaaacatggggaatgtaaggcgtatcgcacggacaaaacaaaaaccactcaccagcttcctgctgcattactgaaagcattcctgccagagggcctgggtaatccgccagtgaatcttcaatcactttcagaccgcttgcctgatagatttcctgatgacgattggcattaaccacgacgtgagagagctgcgtcataagcgcgtcagcgacatgttgccataatggtttgccgtttaattcaagcaatcctttatctacgccgcccattcgtctggctttaccgcctgccagcacaacgcctgttatcgtcgtcatcagattcaccgatatcgcctcttttattgtgggattgaccctgctaacgtgtctgtctcaagagtaaggagcatcactatgaaatgtaaacgtctgaatgaagttattgaactcctccagccagcctggcaaaaagagccagaccttaacctgttgcaatttttgcagaaactggcgaaagagtcaggttttgacggcgaactggcggatttgacggatgacattctgatctatcacctgaaaatgcgtgattccgcgaaagatgcggtgatcccgggtttgcagaaagattatgaagaagacttcaaaacggcgctgttacgcgctcgcggcgtaattaaagagtaaaagcttgtaagcggcgccaccaaaatcatcgtgaaatgatatccttcatcattcgtaatgttttccggatgatgggatgaacaacagcgcttttactttccagacactacacccggataccatcatggacgctctgtttgagcaagggatccgggtggattccggtcttaccccgcttaacagctatgaaaaccgtgtctatcaatttcaggacgaagagcgtcgacgttttgtcgtcaaattttatcgccctgaacgttggacagccgatcaaatcctcgaagaacatcaatttgcgttgcagctggtaaatgatgaagttccggtcgcagcacctgtggcctttaacggtcagactttattgaatcatcagggattttatttcgctgtttttccaagcgtcggtggtcgccagttcgaagctgataatatcgatcagacggaagcggttgggcgttatttagggcgtatgcaccagacggggcacaaacagctttttatccatcgcccgaccatcggtctgaatgaatatctcattgagccacgcaagctgtttgaggacgctacactgataccttccgggttgaaagcggcattcctgaaagcgacagatgagctgatcgccgccgttacagcacactggcgggaagatttcaccgttctgcggctacatggagactgccacgccgggaatattctctggcgcgatggtccaatgtttgttgatctggatgatgcacgtaatggtccagctattcaggatttgtggatgttgctcaatggcgataaagccgagcagcggatgcaactggaaactattattgaagcttatgaagaatttggcgagttcgacaccgctgaaatcggactgattgaacctttacgcgccatgcgtttggtttattatcttgcctggctaatgcggcgttgggctgatcccgcgttcccgaaaaatttcccgtggttaaccggggaagattactggctgcgacaaacggcgacttttatagaacaggcaaaagttctacaagaaccccctttacaattaacacctatgtattaatcggagagagtagatcatgaaaaagatttggctggcgctggctggtttagttttagcgtttagcgcatcggcggcgcagtatgaagatggtaaacagtacactaccctggaaaaaccggtagctggcgcgccgcaagtgctggagtttttctctttcttctgtccgcactgctatcagtttgaagaagttctgcatatttctgataatgtgaagaaaaaactgccggaaggcgtgaagatgactaaataccacgtcaacttcatgggtggtgacctgggcaaagatctgactcaggcatgggctgtggcgatggcgctgggcgtggaagacaaagtcactgttccgctgtttgaaggcgtacagaaaacccagaccattcgttcagcatctgatatccgcgatgtatttatcaacgcaggtattaaaggtgaagagtacgacgcggcgtggaacagcttcgtggtcaaatctctggtcgctcagcaggaaaaagctgcagctgacgtgcaattgcgtggcgttccggcgatgtttgttaacggtaaatatcagctgaatccgcagggtatggataccagcaatatggatgtttttgttcagcagtatgctgatacagtgaaatatctgtccgagaaaaaataattcaatgtaaaggtaatgactccaacttattgatagtgttttatgttcagataatgcccgatgactttgtcatgcagctccaccgattttgagaacgacagcgacttccgtcccagccgtgccaggtgctgcctcagattcaggttatgccgctcaattcgctgcgtatatcgcttgctgattacgtgcagctttcccttcaggcgggattcatacagcggccagccatccgtcatccatatcaccacgtcaaagggtgacagcaggctcataagacgccccagcgtcgccatagtgcgttcaccgaatacgtgcgcaacaaccgtcttccggagactgtcatacgcgtaaaacagccagcgctggcgcgatttagccccgacatagccccactgttcgtccatttccgcgcagacgatgacgtcactgcccggctgtatgcgcgaggttaccgactgcggcctgagttttttaagtgacgtaaaatcgtgttgaggccaacgcccataatgcgtgcagttgcccggcatccaacgccattcatggccatatcaatgattttctggtgcgtaccgggttgagaagcggtgtaagtgaactgcagttgccatgttttacggcagtgagagcagagatagcgctgatgtccggcagtgcttttgccgttacgcaccaccccgtcagtagctgaacaggagggacagctgatagaaacagaagccactggagcacctcaaaaacaccatcatacactaaatcagtaagttggcagcatcaccaggcccgtgaatattcacggttttttttattatttaataaatataaatacattctgataatgcgtcctgccgctggacattatttcagcataagcggatatttaaagttttgctgttttatcagggaatatttatatgatacgtaagtcagctacaggtgttattgttgcgttagccgtaatctggggtggtggcacatggtacacaggtacgcaaattcagcctggtgtcgaaaagtttattaaagattttaacgatgctaaaaagaaaggtgaacatgcctacgatatgacgttaagttataaaaattttgacaaaggtttttttaattctcgttttcaaatgcaaatgacattcgataacggtgcacccgatctcaatatcaagccaggccagaaagttgtatttgatgtggatgttgagcacggtccgttgcccatcacaatgttaatgcatggtaatgtcatcccagcactggcagcggcaaaagtgaacttagtgaataatgaactgacacaaccgctatttatcgccgcgaaaaataaatcgcccgtggaagcgacattgcgattcgcgtttggtggctcattctctacgacattagatgttgcccctgcagagtatggaaagttttcttttggtgagggccagtttacttttaatggtgatggtagttcattgtctaacctggatattgaaggcaaagtcgaagatattgttctgcaattatcaccaatgaacaaagtaacggcaaaaagttttaccattgattctctggcgcgattagaagaaaagaaatttccggttggtgaaagcgagtcgaaatttaatcagattaacattatcaatcacggggaagacgttgcccaaatcgatgctttcgttgcaaaaaccatgctggatcgcgttaaagacaaagattatatcaatgtcaatctgacctacgaacttgataagttaacaaaagggaatcagcaactcggtagtggtgagtggtcattgattgctgaatctattgatccctcagcagtgcgccaatttatcatccagtataacattgctatgcagaagcagcttgctgtacaccctgagttagcaaacgatgaagttgctctgcaagaagtgaatgctgcattgttcaaagagtatttaccgttattacaaaaaagtgagccgaccattaaacaaccggtaagatggaagaacgcactcggcgaactaaatgccaatctggatatcagtattgccgacccagccaaatcttcatcatccacaaacaaagatatcaaattgctcaattttgatgtgaagttaccgcttaatgtcgtcacagaaaccgcaaaacagcttaatttatctgaaggaatggatgcggaaaaagcgcaaaagcaggctgataaacaaatcagcgggatgatgacattgggtcagatgtttcagttaatcacgattgacaacaataccgcctcgctgcagctgcgttatacaccgggtaaagttgtgtttaacggacaggagatgagcgaagaagaatttatgtctcgtgccggacgttttgttcattaaaatactcactcgcctctgctcattcagaggcgagtaaaacttacttattctgacgctgtgatgacatgagagacgtcagaagccggtctttttcctgccacaatgagttcagccattgctgaaaatggcgcttaaagcttttgtcattgatgtagtcgccatgtaactcatcggcaataggctgtaaatccacatgtacgacaatccgcgtcagtttaccgcttaacatatcgaagaacggctgacggttattgtccggataacacagcgtaacattaagcagtttatcgaattgtttatacatttagcgccatcgcaatgcctgccgcctttggtggcaacaagttttgaaaagtggagtgggtttgctgatgtttttcttgcgtgaaacgggagccttcaacgaaattgacaatggtggtgggatgcaggcgaaacttttcacaagaacgccgagtggtttcaacatctttaccacgtcgctccggatgacgtaataaataagcgcgggaataacgcttcataaacggcatatccagcgcccagcacgccaggccaagaaatggcacccaggccagctgttgcttgaggaaatatttattcatcggaatgtgcttacgaaacagcacgcacagtacgacaatatctgcccaactacggtggttacaaataagcagataccagttcttcttacttaacccttccagcccgtgaacttcccattgcaggtgtgggttcagatgcagtaataccgccagaccttcacaccagcaatacatcataaaatcacaaaaacgcgaaacctttcgccaaatgactggcacaggtagcaatagttttacaatcccggcaatgatgatcgggacggaacaaaaaatagtgaccaaaatgtgaggtgtactggcaatagcggacactaccatttgttctttttttaagcagccatctgatgatatttttccctgaaggctgccggggagatattccccagacgagagtgacgacgctgacgattgtagaaaatctcaatgtattcccgtattactgagatggcttcatcccggttattaaaacgatagtggctcaggctctcatttttcagcgttccccagaagctttccatcggagcgttgtcgtaacagttacctttacgcgacattgatgttttcagaccaaactgctcctgtatgacccggtaatcgtatgcgcagtactgtgaacctcgatcagagtggtggattagcccggcaggtgggcgctggctcctgagcgccataaacagggctttacctgtcagctcttttgtcatgcgctctcccatggcgtagccgacaatttcgcacgtataaacatctttgatgccagcgaggtacaaccatccctcctgtgtggcaacatacgtcaggtccgccacccagacctgatttggtgctgtaggagcgaacgtctggttcagcagatttggcgcaactggcagattgtggttcgagttcgtagtcgctctgaacttgcgtttctgcttacagcgtagccttagctccttacgaagacgtgccagtcggtcacgaccaacgatgatgccattctctgccagctccgtctggagccgccgggttccatatgtttcgcgagtgcggatatgtgccaccttaatctccagttttagccgctcatcactttgttttctgtctgagggttcatgctgtacccagttgtaataaccgctcctggatacaccaaatacctgacacatcgcttcaatgggaaattgttgtcgccattgttcgattaacgcgtatttttcagcgactcctgtgcaaaatacgctgttgctttttttaatatatctcgctcaaggcgagcttcatttaacgccttacgtagttgcagaatttcagattccagttcagccaccgtgcgggaaccaggagtaccgagcccttttctggcggcggtaacccattgtcctaaagtgccttcaggaagagataatcgggaagcgccttcactgatcgaaagttgattttcaagaaccgttctgacagcttcggctttgaactctttagagtaacgttgggtttttctgctcattattagctccttctgatgccattctatttcaggaaggagtgtccgttaaactcaggctacctcaatggtcaatacgatactcagcaaaagggttatcgcagcgagtattctcgtcataatgaatttattcaaaaggttagccatagacagtgcgctaaagaagcgcaaggcgcagattttagcagaaaacgacccaaataacggatgatccttaaggagaaaaataatccatatctatccacattagaaaaaatcccattatctcaattattagggatggctttatttttaactgcatgaaaaacaaagacaaacatcatgctgtaaaaagcatgataataaattaaaagcgatgtaaataatttatgcacaaagttatccacatgacgatttgcgagcgatccagaagatctacaaaagattttcacgaaaagcggtgaaaaactcatgttttcatcctgtctgtggcatcctttacccataatctgataaacaggcacggacattatggttcagatcccccaaaatccacttatccttgtagatggttcatcttatctttatcgcgcatatcacgcgtttcccccgctgactaacagcgcaggcgagccgaccggtgcgatgtatggtgtcctcaacatgctgcgcagtctgatcatgcaatataaaccgacgcatgcagcggtggtctttgacgccaagggaaaaacctttcgtgatgaactgtttgaacattacaaatcacatcgcccgccaatgccggacgatctgcgagcacaaatcgaacccctgcacgcgatggttaaagcgatgggactgccgctgctggcggtttctggcgtagaagcggacgacgttatcggtactctggcgcgcgaagccgaaaaagccgggcgtccggtgctgatcagcactggcgataaagatatggcgcagctggtgacgccaaatattacgcttatcaacaccatgacgaataccatcctcggaccggaagaggtggtgaataagtacggcgtgccgccagaactgatcatcgatttcctggcgctgatgggtgactcctccgataacattcctggcgtaccgggcgtcggtgaaaaaaccgcgcaggcattgctgcaaggtcttggcgggctggatacgctgtatgccgagccagaaaaaattgctgggttgagcttccgtggcgcgaaaacaatggcagcgaagctcgagcaaaacaaagaagttgcttatctctcataccagctggcgacgattaaaaccgacgttgaactggagctgacctgtgaacaactggaagtgcagcaaccggcagcggaagagttgttggggctgttcaaaaagtatgagttcaaacgctggactgctgatgtcgaagcgggcaaatggttacaggccaaaggggcaaaaccagccgcgaagccgcaggaaaccagtgttgcagacgaagcgccagaagtgacggcaacggtgatttcttatgacaactacgtcaccatccttgatgaagaaacactgaaagcgtggattgcgaagctggaaaaagcgccggtatttgcatttgataccgaaaccgacagccttgataacatctctgctaacctggtcgggctttcttttgctatcgagccaggcgtagcggcatatattccggttgctcatgattatcttgatgcgcccgatcaaatctctcgcgagcgtgcactcgagttgctaaaaccgctgctggaagatgaaaaggcgctgaaggtcgggcaaaacctgaaatacgatcgcggtattctggcgaattacggcattgagctgcgtgggattgcgtttgataccatgctggagtcctacattctcaatagcgttgccgggcgtcacgatatggacagcctcgcggaacgttggttgaagcacaaaactatcacttttgaagagattgcgggtaaaggcaaaaatcaactgacctttaaccagattgccctcgaagaggccggacgttacgccgccgaagatgcggatgtcaccttgcagttgcatctgaaaatgtggccagatctgcaaaaacacaaagggccgttgaacgtcttcgagaatatcgaaatgccgctggtgccggtgctttcacgcattgaacgtaacggtgtgaagatcgatccgaaagtgctgcacaatcattctgaagagctcacccttcgtctggctgagctggaaaagaaagcgcatgaaattgcaggtgaggaatttaacctttcttccaccaagcagttacaaaccattctgtttgaaaaacagggcattaaaccgctgaagaaaacgccgggtggcgcgccgtcaacgtcggaagaggtactggaagaactggcgctggactatccgttgccaaaagtgattctggagtatcgtggtctggcgaagctgaaatcgacctacaccgacaagctgccgctgatgatcaacccgaaaaccgggcgtgtgcatacctcttatcaccaggcagtaactgcaacgggacgtttatcgtcaaccgatcctaacctgcaaaacattccggtgcgtaacgaagaaggtcgtcgtatccgccaggcgtttattgcgccagaggattatgtgattgtctcagcggactactcgcagattgaactgcgcattatggcgcatctttcgcgtgacaaaggcttgctgaccgcattcgcggaaggaaaagatatccaccgggcaacggcggcagaagtgtttggtttgccactggaaaccgtcaccagcgagcaacgccgtagcgcgaaagcgatcaactttggtctgatttatggcatgagtgctttcggtctggcgcggcaattgaacattccacgtaaagaagcgcagaagtacatggacctttacttcgaacgctaccctggcgtgctggagtatatggaacgcacccgtgctcaggcgaaagagcagggctacgttgaaacgctggacggacgccgtctgtatctgccggatatcaaatccagcaatggtgctcgtcgtgcagcggctgaacgtgcagccattaacgcgccaatgcagggaaccgccgccgacattatcaaacgggcgatgattgccgttgatgcgtggttacaggctgagcaaccgcgtgtacgtatgatcatgcaggtacacgatgaactggtatttgaagttcataaagatgatgttgatgccgtcgcgaagcagattcatcaactgatggaaaactgtacccgtctggatgtgccgttgctggtggaagtggggagtggcgaaaactgggatcaggcgcactaagattcgcctgaacatgcccttttttcgtaagtaagcaacataagctgtcacgttttgtgatggctattagaaattcctatgcaacaactgaaaaaaaattacaaaaagtgctttctgaactgaacaaaaaagagtaaagttagtcgcgtagggtacagaggtaagatgttctatctttcagaccttttacttcacgtaatcggatttggctgaatattttagccgccccagtcagtaatgactggggcgttttttattgggcgaaagaaaagatccgtaatgcctgatgcgctatgtttatcaggccaacggtagaattgtaatctattgaatttacgggccggatacgccacatccggcacaagcattaaggcaagaaaattattcgccgtcctgcgtttcttctacaggctgcatctcgctaaaccaggtatccagtttctgccgcagcttgtccacgccttgtttcttcaacgaagaaaacgtttcaacctgcacatcaccgttaaacgccagtacagcttcacgcaccatattcaattgcgctttacgtgcgccgcttgccagtttgtccgctttggtcagcagcaccagaacggcgatattgctgtctaccgcccactcaatcatctgctgatccaaatctttcagcggatggcgaatatccattagcaccaccagaccttgcaggctctgacgtttttcgaggtattcgccgagcgcacgctgccatttgcgcttcatctcttccgggacttccgcataaccgtacccaggcaagtcaaccagacgcttgccgtcagccacttcaaacaggttgataagctgggtgcgccctggggtttttgaggtacgagccaggcttttctggttagtcagcgtgttcagcgcgctggatttacctgcgttggaacggcctgcaaaagccacttcaattccggtatcggaaggtaggtggcgaatatcaggcgcactcatcacaaaatgcgtctgttgataattcaaattagtcaaagcggtcgtctccgtcagtcaaagctttgtggcgattatacctgaaccataataaaaggcggatttttcggcgtgagcgttgtaagtaaaagccatacgctttgtgagacattgccgatagtctttatgcgaaatagcagagaaaattctgcgatgcatgtcaaataagctatataaatcagtgaattgcttttatataaaactctgaaaatgtgcaaatactgatggcggttgattgtttgtttaaagcaaaggcgtaaagtagcacccatagagcgaggacgctaacaggaacaatgactcaggatgagggtcaggagcgccaggaggcgaagacagaggattgtcaggaagacaaacgtccggagacgtaattaaacggaaatggaatcaacacggattgttccggctaaaggaaaaacagggtgtgttggcggcctgcaaggattgtaagacccgttaagggttatgagtcaggaaaaaaggcgacagagtaatctgtcgccttttttctttgcttgctttctgttagattccgccgcaaatctatactgaataaaacggctaaaagacgaaccattatgaaaccatcatcttcaaactcacgcagcaaaggtcatgcaaaagcgcgtcgaaaaacacgcgaggagctggatcaggaagctcgtgatcgcaagcgtcagaaaaaacgtcgtggtcatgcgccgggcagccgcgcagcgggcggaaacaccacgtcaggcagcaaaggccagaacgcaccaaaagatccacgtattggcagtaaaacccctattccattgggcgtggctgaaaaagtcaccaaacagcacaaaccgaagagtgagaaacctatgctttcaccgcaggcggagttggaattactggaaacggatgagcgtctggatgcgctgctggaacgtctggaagcaggcgaaaccctgagcgccgaagagcaatcctgggtggatgctaaactggatcgtattgatgagttgatgcagaaactcggcctctcttatgacgatgacgaagaagaggaagaagacgagaagcaagaagacatgatgcgtctgctgcggggtaactaacggattgccaccgtgggccttcccgttctgctgataacccttccggttatatgttatctggtgtggttattcgttaaactacagcggttgtcgcggcgacaaaagtggctgcgcaaccggctgatgacccgaaacgggcatccgccggtacgccgtagccgccagagacgccatcggaaggagtgagcatgtctgtacagcaaatcgactgggatctggccctgatccagaaatataactattccgggccacgatacacctcgtacccgaccgcgctggagttttcagaagacttcggcgaacaggcgtttttacaagccgtggcgcgctatcctgagcgtccattatctctctacgtacatatcccgttctgccataagctttgttacttctgcggttgcaataagattgttactcgccagcagcacaaggccgatcagtatctggacgcgctggagcaagaaatcgtccatcgtgcaccgctgttcgccgggcgtcacgtcagccaattgcactggggcggcggaacgccgacgtatctgaataaagcgcaaatcagccgcctgatgaagctgctgcgcgaaaacttccagttcaatgccgatgcggagatttcgatcgaagtcgatccgcgggaaatcgaactggatgtactcgatcatttacgcgccgaaggctttaatcgcctgagcatgggcgtgcaggacttcaacaaagaagtgcaacgtctggttaaccgcgagcaggatgaagagttcatctttgcactgcttaaccatgcgcgtgagattggttttacctccaccaacatcgacctgatttacggcctgccgaaacagacgccggagagtttcgcctttaccctgaaacgtgtggcggagctgaaccccgatcgtctgagtgtctttaactacgcgcatctgccgaccatttttgctgctcagcgcaaaatcaaagatgctgacctgccgagtccgcagcaaaaactcgatatcctgcaggaaaccatcgccttcctgacgcaatcgggctatcagtttatcggtatggatcactttgcccgtccggatgacgagctggcggtggcccagcgtgaaggcgtgctgcatcgtaacttccagggctacaccactcagggcgataccgatctgctggggatgggcgtttccgccatcagcatgattggcgactgctacgcgcagaaccagaaagagttgaagcagtactatcagcaagtggatgaacaaggcaatgcgctgtggcgtggtattgcgctaacgcgtgatgactgtattcgccgcgatgtgattaagtcgctcatctgcaacttccgtctggattacgcccctattgagaaacagtgggatttgcacttcgctgattactttgcggaagatctcaagctgctcgccccgttagcaaaagatgggctggtggatgtggatgagaagggaatacaggtgacggcgaaaggtcgcttgctgatccgcaacatttgcatgtgctttgatacctatctgcgccagaaagcgcggatgcagcagttctcacgggtgatttaaatagtgaatggcgcttcgtttacaaagtagaaaacgaaagcgccatcaatgtgctgagaacaagattgcctgatgcgctacgcttatcaggcctacaaaacctgttgaaaatattgcttttgtaggccggataaggcgttcacgccgcatccggcatgaacaaagagcacttcatcagcaatctgaaactcaactaaacagcccaatcattgcggcacacagcacggcagcaacggcagtttgcggtgtgtggctgtcaactgcgccactcgataccagattaattattgattccagcataatgactctccccgttttccgggcaagatcatactgaacttatcggaacagtaaagcgtaaaataccagcaatttgcgctcaataatcaatctttacacacaagctgtgaatcactccatccccagctcttttaacttacgcgtcagggtgttgcggccccagccgagtagccgcgccgcttcctgtttatgcccctgcgtatgtcgcaacgcggtcgtcagtaacgtccgctccagctctggctgcgcttcggaaagcagattttgatgaccggaacgcagcgctctgtctgcccactgcgcaagaagcgttgcccagctgtccggttgcatttgcgaagtactctccgcaaccgttgattcaaacagttcgccgggcaaatcctgaatcaacacttcctgcccggcggccatcaccgttagccagcggcaggtgttttccagctggcgcacgttgcctggccacgccagacgcgtcagagcagcttcggtttccggatgcagtaacttcgcttctacgcccagttcgcgcgcggcaacctgtaaaaaatggcgcgccagacggggaatatcttcccgacgttcgcgcagcggcggcagatgaacgcggataacgttcaggcggtggaacagatcctcacggaacttaccttcctgcactcgttgttcgagattctggtgagtggcagcgataatacgcacatccactttcaccggcgcatagccgccaacgcggtaaaactgaccgtctgccagcacgcgcagcaaacgcgtctgcacatccagcggcatatcaccaatttcgtcgaggaataatgtaccgccatcggcctgttcaaaacgcccctgacgaatggtattcgcgccagtaaacgcgcctttctcgtggccaaacagttctgattcgatcaaatcttttgggatagctgccatattcagcgcgataaacggcgctttggcgcgcggactgtggcgatgcagggcatgagcgaccagttctttaccggtgccggattcgccgttaatcagcacgctaatagaagaacgcgaaagccgaccgataatacggaacacgtcctgcatggctggcgcttcgccgatgatatcggtcgttgggccgttaagctgaatattacgcggctgctgctgttcctggtaatgactgatagcgcgctcaaccagcgccactgcttcgtcgatatcaaacggtttgggcagataatcaaacgccccttgttgataggcgctgacggcagcatccagatcggaatgtgcggtcataatgatgaccggaagcattggatggcgctgtttaatctgcttgagcagcgccagcccgtccattcccggcatacggatatctgaaagcagcacatccggcgttttgctcgccagcgcctccagtacttccgcgccgttctcaaatgtcgtacaggttaaacccgctccagcgagcgcacgttcaagcacccaacggatggaactatcgtcatcgactacccagactatccctcgttgcataaacgtcacctttatttcctgataggcaggtaaaccgagaactcggtatgacctggccaactggtaaattcaattttgcctgaatgctgatcaatcaaattacgggcgatggataagccaagcccggtgccaccttcgcggccgctgaccatcgggtaaaacagcgtatcctgcaaatgaggcggaatgcccggcccgttatcttccacatcaatccgcgccgccagccggtagcgctcgccgtgtaaggtcagttgaaacgcggtgcgggtacgcagaatgatttcaccgccttccggccccagcgcctgtagcgcattgcgcacaatattcagcaagacctgttcaatttgatccgggtcgtgcgccagttccggcaggctggggtcgtaatcacgaatcaaccgcacgttgtccggcagttccatcgacaccagcgtcaccacgcgttcagctactttgtgaatactttcggtaacgcgcgtaccgggcagctgcggccccaacagacggtcgaccagatttcgcagccggtccgcctgttcgataatcactttggtatattcgagtagtgatgggtcaggtaacgctttgctgagcagctgcgccgcgccacgtaaacctccaagcggatttttaatctcatgtgccaggccgcgcactaaatcacgggcagcaacctgctgggcgtgctgtagctgttcctgacttaagcggcgctggttatccatcggagccatctccagcaggatcatgccgtccggcatacgctgggccgtcacagaaaggatatgcgagcgcccgtcgatgaccagcgtcacttcgttatcggtaaaaccttgccccgcctccagactttcttgcatcagctcgatatttaatgagaagtagctcaacagttccggtaacggtgtaccaaacaatttgcgggagctttgggcgagcagttgttgcgcggcggggttggcgtaatggatcgccagattgtcatcaattaacaaaatactgttaatcagcgagttgaggatctgcccagcatcgggctgcgtgcctgttgccataaagcagtctcctgaacaggttgcaccattttagtgcattatagctttttacggataaaaagcgcgaagcatcagagaattgacggagaaaaaagcccatgcagagatgggctgaaagtttccacggcaactaaatcccggcgttgttgcgccgggtagtacaacttcaactattagacgctgtagtacagctcaaactctaccggatgcggagtcatacgcacgcggtcatcttcttcgcgacgtagagcgatgtacgcatcaattgcttcgtcagtgaacacgccaccggctttcaggaactcgcggtccagatccagttcgttcagtgcttcttccagagagcctgcaacctgtgggatctctttcgcttcttctggcggcaggtcatacaggtttttgtccatggcttcgcccggatggatcttgttcttgataccatcaagaccggccatcagcagggcagcaaagcacaggtacgggttagctgccggatccgggaaacgtacttcgatacgacgtgctttcggagaagaaaccaccggaatacggatagacgcagaacggttacgcgcagagtaagccagcattaccggtgcttcatagcccgggaccagacgcttataagagttggtggtcgggtttgccagggcgttaatcgctttagcgtgtttgattacgccgccaatgtagtacagcgcctgctcagacagacctgcgtatttgtcgcctgcgaacaggttaacgccgtttttagacagagacatgtggcagtgcataccggagccgttatcaccgaacatcggttttggcataaaggtcgcggttttaccgaagcggtgcgctacgttgtgcacaacatatttgtagatctgaatttcgtcagcttttttggtcatggtattgaagcgggtagccacttcgttctgaccagcagtcgctacttcgtggtgatgggcttcaaccaccagacccatctgttccatcaccagacacatttcagaacgaatatcctgagccgagtctaccggtggaaccgggaagtaaccgcctttcactgccggacggtgacctttgttaccaccttcgtattgggtggaggagttccatgcgccttcgatatcgtcgatagcaacgtgggaaccggagatagatgatccgaaacggatgtcatcgaacaggaagaattcaggttctggcccgaacagtacggtgtcggcaatgccagtggaacgcaggtaatcttcggcgcgcttcgcaatggagcgcgggtcacggtcatagccttgcagggtgccaggttcaaggatgtcgcaacggataatcagggtggagtcggcgaagaacgggtcaatcactgcggtggatgcgtctggcatcagcaccatgtcggactcgttaatgcctttccagccgccaatcgaggagccgtcaaacattttgccttcttcgaagaattcagcattcacctgatgagcagggatagtgacgtgctgttctttacctttagtatcggtgaagcgcaaatcaacaaacttcacttcgtgctcgttcagcatcgtcagtacgtgttcagcggacatactttaactctcctggattggtcatggtcgtcgtggtaacgaaatctgcaattattttggccgtgtcgccgtaaaaaagataaagcgaaatctgtgccaacttttaaattgcccctaaaaggcgttatcatgcgcaccatcgtgcaaaagggctgcaccacgatgtgaatgttgcaccaatatagtgcttcaatggaaacattaagcaccatgttggtgcaatgacctttggataaccctttttatgctccgtgaaagcgatcacaaagggactctgcaatacttgtttgcggaggatgtttgtgatcctgttttgtagtgcgattaatccgtgtacaataacgcgctatttctaatgcctgaggcaaagttgtgatcgaaaaattgcgtaatatcgccatcatcgcgcacgtagaccatggtaaaaccaccctggtagacaagctgctccaacaatccggtacgttcgactctcgtgccgaaacccaagagcgcgtgatggactccaacgatttggagaaagagcgtgggattaccatcctcgcgaaaaacaccgctatcaaatggaatgattaccgtatcaacatcgttgataccccggggcacgccgacttcggtggtgaagttgaacgtgtaatgtccatggtagactcagtgctgctggtggttgacgcatttgacggcccgatgccgcaaacgcgcttcgtaaccaaaaaagcgtttgcttacggcctgaagccgattgttgttatcaacaaagttgaccgccctggcgcgcgtcctgattgggttgtggatcaggtattcgatctgttcgttaacctcgacgcgaccgacgagcagctggacttcccgatcgtttacgcttctgcgctgaacggtatcgcgggtctggaccacgaagatatggcggaagacatgaccccgctgtaccaggcgattgttgaccacgttcctgcgccggacgttgaccttgacggtccgttccagatgcagatttctcagctcgattacaacagctatgttggcgttatcggcattggccgcatcaagcgcggtaaagtgaagccgaaccagcaggtcactatcatcgatagcgaaggcaaaacccgcaacgcgaaagtcggtaaagtgctgggccacctcggtctggaacgtatcgaaaccgatctggcggaagctggcgatatcgtggcgatcacgggccttggcgaactgaacatttctgacaccgtttgcgacacgcaaaacgttgaagcgctgccggcactctccgttgatgagccgaccgtttctatgttcttctgcgttaacacctcgccgttctgcggtaaagaaggtaagttcgtaacgtctcgtcagatcctggatcgtctgaacaaagaactggtacacaacgttgcgctgcgcgtagaagaaaccgaagacgccgatgcgttccgcgtttctggtcgtggcgaactgcacctgtctgttctgatcgaaaacatgcgtcgtgaaggtttcgaactggcggtatcccgtccaaaagtaatcttccgtgaaatcgacggtcgtaaacaagagccgtatgaaaacgtgactctggacgttgaagaacagcatcagggttctgtaatgcaggcgctgggcgaacgtaaaggcgacctgaaaaacatgaatccagacggtaaaggccgcgtacgtctcgactacgtgatcccaagccgtggtctgattggcttccgttctgagttcatgaccatgacttccggtactggtctgctgtactccaccttcagccactacgacgacgtacgtccgggtgaagtgggtcagcgtcagaacggcgtactgatctctaacggtcagggtaaagcggtcgcgttcgcactgttcggtctgcaggaccgcggtaagctgttcctcggtcacggtgcagaagtttacgaaggtcagattatcggtattcacagccgctctaacgacctgactgtaaactgcctgaccggtaagaaactgaccaacatgcgtgcttccggtactgacgaagctgttgttctggttccgcctatccgcatgactctggaacaagctctggagttcatcgatgatgacgaactggtagaagtgactccgacctctatccgtattcgtaaacgtcacctgacggaaaacgatcgtcgtcgcgccaaccgcgcaccgaaagacgattaatttcgttttttagttataaaaaacctgccatcgctggctaatgccgatcagttaaggatcagttgaccgatccagtggctgtgtaagaatccggaaacgctcacttgtttccggatttttttatgcacattggacaggctcttgatctggtatcccgttacgattctctgcgtaacccactgacttctctgggggattacctcgaccccgaactcatctctcgttgccttgccgaatcaggtactgtaacgctacgcaagcgccgtcttcccctcgaaatgatggtctggtgtattgttggcatggcgcttgagcgtaaagaacctcttcaccagattgtgaatcgcctggacatcatgctgccgggcaatcgccccttcgttgcccccagtgccgttattcaggcccgccagcgcctgggaagtgaggctgtccgccgcgtgttcacgaaaacagcgcagctctggcataacgccacgccgcatccgcactggtgcggcctgaccctgctggccatcgatggtgtgttctggcgcacaccggatacaccagagaacgatgcagccttcccccgccagacacatgccgggaacccggcgctctacccgcaggtcaaaatggtctgccagatggaactgaccagccatttgctgacggctgcagccttcggcacgatgaagaacagcgaaaatgagcttgctgagcaacttatagaacaaaccggcgataacactctgacgttaatggataaaggttattactcactgggactgttaaatgcctggagcctggcgggagaacaccgccactggatgatacctctcagaaagggagcgcaatatgaagagctcagaaaactgggtaaaggcgatcatctggtgaagctgaaaaccagcccgcaggcacgaaaaaagtggccgggactgggaaatgaagtgacagcccgcctgctgaccgtgacgcgcaaaggaaaagtctgccatctgctgacgtcgatgacggacgccatgcgcttccccggaggagaaatggcggatctgtacagtcatcgctgggaaatcgaactgggatacagggagataaaacagacgatgcaactgagcaggctgacgctgagaagtaaaaagccggagcttgtggagcaagagctgtggggtgtcttactggcttataatctggtgagatatcagatgattaaaatggcggaacatctgaaaggttactggccgaatcaactgagtttctcagaatcatgcggaatggtgatgagaatgctgatgacattgcagggcgcttcaccgggacgtataccggagctgatgcgcgatcttgcaagtatgggacaacttgtgaaattaccgacgagaagggaaagggccttcccgagagtggtaaaggagaggccctggaaataccccacagccccgaaaaagagccagtcagttgcttaactgactggcattagccatcgctggcaggttttttttgcttatggaaaacaaaatccgctgaaattcccagcggattttccgaaatttcaatttcaggatacttcttgctcggcaaccaccagttcaacattctcttcacttaacaactggcagaaagaattgggaggcggggcatcagtaaaaaaagccctgacattccgtgcattgccaattgaaacggcagcagacgcggcaaacttcgtatgatcggccactaacaatgtattccgcgcatgtttaatcatcgttctcgcgactaacgcttcatttacatcaaattccagtagggtgccgtcatgttcaatggcacctatactggtgattaaataatctgcgcggaagccttcaataaaatccacggctcctgggccgataatcccgccgttatgagcgcgtaaagtgcctcccggcaccatcacttcaatatcctgattcttataaagaatctgtgccacacgtaggctgttagtgataatgcgtaaatcacgccggttgagtaatgccctggcaacggcttctacggttgtaccgatggtgataaagacggtacagcgttcgggaaggtaatcggcgactgcctcagcgatcgcccgtttctcggcggtgagcgaaagttcccgttgctcaaaagcggtattcatgacgctggagacgcgcccggcccctccatgatgacgggtgatcaagccctgctcactgagttttcggatatcccggcgcacggtttgcgttgaaacatccagcagttgtgccagttcttcaatattcatataaccgcgttctgcgattagatgaacgagttggtcatggcgtggattacctgtcacttcgatgatactcatgaatactcccttgcccctcctcggtagatgtttaccattttacgcataaagtgacaaaaatgattcggtttgctcacgattaggaatgccggcccgaccgccaggctgggtacatttcatcgcggcaaccgcactggcaaaacgaatagcctcttttgttgtaatgccagtcagttaagcaactgactggctctttttcggggctgtggggtatttccagggcctctcctttaccactctcgggaaggccctttcccttctcgtcggtaatttcacaagttgtcccatacttgcaagatcgcgcatcagctccggtatacgtcccggtgaagcgccctgcaatgtcatcagcattctcatcaccattccgcatgattctgagaaactcagttgattcggccagtaacctttcagatgttccgccattttaatcatctgatatctcaccagattataagccagtaagacaccccacagctcttgctccacaagctccggctttttacttctcagcgtcagcctgctcagttgcatcgtctgttttatctccctgtatcccagttcgatttcccagcgatgactgtacagatccgccatttctcctccggggaagcgcatggcgtccgtcatcgacgtcagcagatggcagacttttcctttgcgcgtcacggtcagcaggcgggctgtcacttcatttcccagtcccggccacttttttcgtgcctgcgggctggttttcagcttcaccagatgatcgcctttacccagttttctgagctcttcatattgcgctccctttctgagaggtatcatccagtggcggtgttctcccgccaggctccaggcatttaacagtcccagtgagtaataacctttatccattaacgtcagagtgttatcgccggtttgttctataagttgctcagcaagctcattttcgctgttcttcatcgtgccgaaggctgcagccgtcagcagatggctggtcagttccatctggcagaccattttgacctgcgggtagagcgccgggttcccggcatgtgtctggcgggggaaggctgcatcgttctctggtgtatccggtgtgcgccagaacacaccatcgatggccagcagggtcaggccgcaccagtgcggatgcggcgtggcgttatgccagagctgcgctgttttcgtgaacacgcggcggacagcctcacttcccaggcgctggcgggcctgaataacggcactgggggcaacgaaggggcgattgcccggcagcatgatgtccaggcgattcacaatctggtgaagaggttctttacgctcaagcgccatgccaacaatacaccagaccatcatttcgaggggaagacggcgcttgcgtagcgttacagtacctgattcggcaaggcaacgagagatgagttcggggtcgaggtaatcccccagagaagtcagtgggttacgcagagaatcgtaacgggataccagatcaagagcctgtccaatgtgcataaaaaaatccggaaacaagtgagcgtttccggattcttacacagccactggatcggtcaactgatccttaactgatcggcattacctcttttgttggcattttttctgccaacgctaccgcgagtgcgccgtgaaaaacatcgcctgctccagtggtatcaaccacattgacagaaaatgcctcctgttgacacaaatgaccatcttcaatccacaacgatccttcagaacccagcgtaacatacactttacctgctgtttgtgtcgttgcctggaacaaaccttcttcaggtgactgcaggccagtcatgcgtttcagccctggtgttgagaacacggcgtgatcggcaagcgcgacaagtggagaaatatcctgcggtgtcatatcggcgtctaaaagcgttgtcacacccgcaaggcgcgctagcgagaatgctttttcagtaccgctatgccagcgaacatcggccagaatcagatcataacgagagaaatcgatcgcttctaaccattcggcatcagtaccgagatcaggacttggataattaacgataatccgttcgccatgctgatcaacgaggatcgctgattgcgacgaacgggcgttaggatatcggcggcaaaatgcggtattgacgccccaaccctcaagttctgcaagtaaggtatttccacaactgtcatcgccgacgcgaccgatgaaatcaacctccacgccaagctttgcgattgcaacagcggctgttgctgccgggccgccaccaatctcaagataatgatttgcctgatatttcccgccgccctccggcagagtgggcaaagaataaattctgtcctgaactgtgatacccacgcatgcaattctggtcatatttgtcttgtcctgtttaattttgtcgtctttggtcaatttaaatgacgcaaatgatcaaattagtgatgcgtgtcgtgtttttgaacataaattacaaatatgctcaaaaacagacgaaaacgaattttcaattgtcattattttgtcaatgtcagacaggagagtattcatggcaaccattgcatttctcgggctggggcagatgggtagcccaatggctaacaatctattgcaaaaagggcattcattgcaggtatttgatgtcaatgcacaggccgtcgatgcgctagttacgcagggggccactgcggcacaaaccccagcggaagcagcagcaggcgctgaatttatcatcactatgcttcccaatggtgacattgttcgacaggttctgttgggggaaaaaggcgtctgtgaggctgtttcatctgacgcgttattgattgatatgtcgactattcatcccttacagaccgatgcattaatacgggagttacaagaaaaaggcatcagtatgatggacgctcccgtgggcagaacgtccgtgaatgcgattgatggcacattgctgattttagcgggtggcactgatgagcagattgcacgtgcacgcccgattctcatgtgcatgggtaatgagctggtcgaggctggcggcccaggaatggggatccgcgtgaagctaattaacaactatatgagcattgcgcttaatgcgctgtcctccgaggccgctgtgttatgtgagtcactgggattaaatcttgatgtcgcaattaaggtgatgagtggtacggcagcagggaaaggacattttacgaccacctggcctggcaaagtgctgaaaggcgatctttcacccgccttcatggtggatctggcgttgaaagatctgcgtattgcagttgacgtcgctcgggagacgggggcaccgctcaatatggggattgcagcagaaagttattacgctgcagcaagtcaagacggcaaagggcggcaggactggagtgccctgctaaatcaggttcgccagcaggctggtctttaattttatctattaacaggagtttctatgtcatcccacttcaccccatttacgctgaaagatatctcccgcccaggtggtggatttgccatgttagctgtcgatcagcgtgaggccatgcgcttgatgtttgcggcagcagggcagccaaaacccatcgctgacagtgtactcaccgattttaaagttgccgcgacccgaatcctttctccttatgcttctgtcgttctggcggataaacaattttgtcttgagcaaatagtcgagcagggcgctgttgctaattcttgcggcctgattgtcgctgccgatctttttatcccaggtaatggcatcccggttgatagcgttgaaatagatatgtccgtcgacccgcataaagcccgtgaaatgggggctaaggcaatgaaattacttgtactctggcgtgaagatgaacccgcagaggaacgtctggcaatggttgataaatttgttcgtcgctgccgtagtgccgggctggtgagcattattgaacctgtggtgcgtccacctcgtcgcggttgggactttgatcgtgaaagcaccattgttgccgccgccgcagagcttggtggaacagaggctgatctttacaaagccgagatgccattagggggcaaaggcgatgaaaaaaccttacttgccgcctgtcagcaacttaacgatcagatgaagatgccgtgggtaattctttcttctggcgttgatgccgatatttttggccgtgcagtaagtattgccatgaaaggtggtgcgtcgggcttcctggctggacgagcggtttgggcgtcggttgttggtgcacaagatccacaaactatgctgcgcgatgtctctgttcctcgtttacaacggttggcagaaattgtcgatgaaggtatcgcgcaacgctaatcccctatggatatcgattctggagaataacaatggataaaatttcagatattgggaaagtcaccactcaatatgttgaagtaccacaccaggaacttaaaccgcacgaagtgcggattgcgcctgtgttctatgggatatgcggttcggatctgcatgttctgaaaggcggtcatccgtttgccaaaccacctgtcgtccccggtcatgaaattgcagcgcgcgttacggaagttggcagcgacgttaaaaatgtacagccgggcgatcatgttgtggtcgatcccatcatggcttgcatggaatgccgagcctgcaaagcaggacgttttaatctttgtgaaccaccgcaggttgctggttttcgcgcaccgggctttgctcgctcacaacacattgttcctgcgcgtaattgccatgtcgcaccagcctctttaccgctaaaaatgttggcctttgccgaaccggcggcttgtgcccgtcactgcgttaaccgaatgccgaaagcttctctggaaagcgtactggtaattggtgccggaacgataggcttatccatcgtgcaggcactgcgcattatgggggcaggtaagattaccgtgattgaacctgacgctgccaaacgcgcgctggcgttaaagctgggcgcagcagaagtttgggcaccaggtgagctggccgcagatgtgcgatttacgggggcgattgatgtcgttgcagcgcaggccacgcttaacgatgcatgtacccgtgtatatgccggaggcaccgtcgtgtgcatgggcgtaccaagtgggccgcgtgaaataccattaccgatgatgcaacgtttcgagcgtgacttgctcaactctggcatgtacatccctgaagatttcgatgttgttatcgaatggctggcggatgggcggtttgataccagtgaactggttaccgatttatttgccattgaggatgcagcggcggcatttgaacgcgcgcagcaaaatgactccataaaggtcatgctgcaatttgcgccggaatgattttctaaatctctgtctggcgctgcgtcacgtcagcgccaccctacaacaattaaaaaggacactgcgatgagtcaaatcaccagtcctgcaacttattcaattagtcggccacaggacgtaattgatattgttaataagaactctgcaatcaacaccagtatcggcgttatttttattgctttgggcggcatattgattgatgcctaccaggcggcgatggtggggtttggtaataaatacattgccgctcaattcggcatttcgccgggtcttgctgcaaccgtcaatgcatcagtattaatcgccgcgttaattggcggtttattagcgaaccgagtaataaaccgctttgggcaaaagcgggcatttattattggcatggggctgtgcaccatcggtgctgcagcggtagctattgctcccagtatctggtgggtgctggtgtgccgcgtcatcatgggctttggtttaggcattgacttccctttggcaaccaatgccgtggcagagcttcgtggttcaacgtcgaagaaaaccggaacgtcggtcaacctctggcaaatggcctggtatgtttcgacaaccgttgtttatttggtacttttgccgctgcttctgtcgggtatcgctgaagaacaattgtggcgttacggaatattcatcggagctatttttgcagtcatcttcatgattttgcgttacttctttattggtgaatccgcaatgtgggccgcacgcgtcgggcgttaccaggaagcgtgcgacattctgggaaaacgttatggtgttcaggctcgcgttgcggcatcgggtacaacagaagcgaaattctcggaaaaagcagagaataaatacagtggtggatatggcatcttatttaatgatcgttaccgcaaacgcaccattcttggctgtgtcgtggcaaccatgcaggcgtggcaatataacgccgtaggtgtttatcttcctcttacgttggcgggaataataagtggcgggcttactggcgcgttgaccggttctgccgtcgtgaatgccctttgtggggtgacaggggggatgatcggctcgtttattctccaacgactgggtactcgccgacagtcgatgtatggatttgctgttgtgaccttagcattgctgtcgttaggcgcactggcaacgactaatccctggctgtctttagggttattgggatcaattattttcttccattcagcgggtcctggtgggctgggcatgaccattgccacactctcttatcctcccgctattcgccctactggggtcggatttgcccgcgctattatgcgcacaggggcaattgcaggactcattttctggccgatgctgtggggtgcgttgaaaactgaagcgttttactggttggcaatcgtgccattcctggggttcctgacctgcgtattgattaattgggaaccactgggtgcaaatgttgatgctgaggatgcagaggttctggctgaattgaagaaataaattaatgcgcatcggcttaaaccgatgcgcattaattcaaactgcccacgtttagtggttcgtatcccagatttctcgcctaccaggagaggaaaattatgtctgaaaagttacccgcaccgcgtgaagggctttccggtaaagccatgagacgtgtcgttatgggcagtttcgcaggcgcgttaatggaatggtatgacttctttatttttggcacggcagcaggactggtatttgcaccgctgttttatccagacagcgatccttttataggtcttatagccgcctttgcgacctttggtgtcggttttctgactcgtcctttaggtggcatcgtctttggtcattttggcgataaaatcgggcgaaaaataacacttatctggacgctggctattgtcggttgctccacatttttgattggttttattccgacgtatcaggaaattggcatttgggcaccgcttgtattaatggtgctgcgtttgattcagggctttggtcttggtggcgagtacggcggagcggcattgatgaccatagaatcagcgcccgaatcccgacgcggatttttaggttcactcccgcaaacggctgcgtctgtgggtattatgctggcaaccggtatttttgctctctgtaaccattttcttacttcggagcagtttctctcctggggatggcgcattccgttttggctttctgcggtgatgttgatcgttgggctgtttatccgcctgcataccgaagaaacactggattttcaaaagcaaaaaacgacgaataataaagaaaagtccgttcctccgttgattgaattattcaaaaaacatccacgaaatattttattggcactgggtgcgaggctggcggaaagtgtctcctctaatattattaacgcctttggtattgtctatatttccagccaattagcattgtcgcgagatattcccctgacgggtatgttgattgcctcggcgatcggtattttcagttgtccattggttggatggttatcagatcgtataggtcaaaaaagtctgtatttgtcgggagcaggattttgtgtcctgttcgcgtttcctttcttcttattactggatagcaaaagtacgctcatcatctggtgcagtatgatcctcggctacaacttaggtccgacgatgatgtttgccgtgcagccaacacttttcacccgcatgttcggtaccaaagtacgatataccggcctttcttttgcttatcaattttccgcgattcttggcggactaagcccccttatcgcctcaagtttgctggcgctagggggaggaaaaccgtggtatgtcgctctgtttttatttgctgtctcagttctttcctttgtttgcgtctggctgattgagccgaccgatgaacaagaaaccgcttcttaccgctacatcagggaacaatctcatgaaaactgaacgaaaaaacgagcattacctggcgctacaacaggcgtttgacgcgccatggcctgggcctgtaggagagttagtgacgctggaaaaaggcaatattcacctgcagatttatccgcatgatggtgccaggataacctcgttaaaggcatttggttctgaagtattacgccaatggcagccgcagcgcagagcttttcagtatggctgtttcccaatggtgccgtgggcagggcgactggggaatgcgacgctgaatgctggtgggcaatgttattctttacccgccaataaaccaccacatgcgttgcatggtatggcttgttactcaacgtgggaaatcatcgacaaaacagcagattccctgactttacgtatgcccctggcttcaccgtggccctggcaaggggaagtgattcagacttttttgctggagaacgatgcgctggttttgcaactggaagtccattcatatgccgatacattcccggcctccgcaggctggcatccgtggtttgcgaaaaagctgactccgcaaaatacagaatcgttgcaggtgctttttgatgcggactggcaagaagaagcgggtagtgatgaactgccaactggaaatcgtatctctcctcaagccggtccctgggatgactgttttggtttttataacggggtgaaggttaagttactgtggcctggtaaactcgcgatgaccatgatctcttctgcaaacagtctggtggtatttgataaacagcccgatgccacctgtattaacccgctgactcaggcacctaacgcaataaatctaacgccggaattggtgacaccagataggccgctggtcatcgaaactcgttggcaatttacacctgaatcttaaccattcatctattgcgaaaaagccagtgaaattactctgctttttcgcaatcagcatcacaagattacccttattgccacatagccaaacccatcctttcccgctacagttaatttcttgtggcgcgaaaggaggcaaaaatgctctatatctttgatttaggtaatgtgattgtcgatatcgactttaaccgtgtgctgggagcctggagcgatttaacgcgtattccgctggcatcgcttaagaagagttttcatatgggggaggcgtttcatcagcatgagcgtggggaaattagcgacgaagcgttcgcagaggcgctgtgtcatgagatggctctaccgctaagctacgagcagttctctcacggctggcaggcggtgtttgttgcgctgcgcccggaagtgatcgccatcatgcataaactgcgtgagcaggggcatcgcgtggtggtgctttccaataccaaccgcctgcataccaccttctggccggaagaatacccggaaattcgtgatgctgctgaccatatctatctgtcgcaagatctggggatgcgcaaacctgaagcacgaatttaccagcatgttttgcaggcggaaggtttttcacccagcgatacggtctttttcgacgataacgccgataatatagaaggagccaatcagctgggcattaccagcattctggtgaaagataaaaccaccatcccggactatttcgcgaaggtgttatgctaaaaaccattcaggacaaagccaggcaccgtacccgtccactatgggcctggctaaaactactctggcaacgtattgatgaggacaacatgacaaccctggcaggtaaccttgcctatgtgtctttgctctcattagtgccgctggttgccgttgtttttgcgcttttcgccgcttttcccatgttttccgacgtcagcattcagttacgtcactttatttttgccaactttctgcctgctactggcgatgttattcagcggtatatcgaacaatttgttgccaattccaacaagatgaccgccgttggggcgtgcgggctgatcgtcaccgcgttattgttgatgtactccatcgatagcgcgttgaataccatctggcgcagtaaacgagcgcgaccaaaaatttactcgtttgccgtgtactggatgatcttaacgctggggccgctgctggcaggggccagtctggcgatcagttcctatttgttctccctgcgctgggcgagcgatctcaatactgtcatcgataacgtgctgcgtatttttccgctgctgttgtcgtggatctccttctggttgctgtacagcattgttcctaccatccgcgtacctaaccgcgacgcgattgtcggcgcgtttgtcgctgcactcctgttcgaagcaggaaagaaaggtttcgcgctttatatcaccatgttcccgtcatatcagctcatttacggcgtgctggcggtgatccccattctcttcgtttgggtctactggacatggtgtatcgtcttgcttggcgcggaaattactgtcactctcggggaataccgcaaactaaaacaagcagctgaacaagaagaagacgacgaaccatgattgcattaattcaacgcgtaacccgtgccagcgtcaccgtggagggagaagtgacgggcgaaattggcgcgggacttttggtgttattgggtgtcgaaaaggatgacgacgaacagaaagcaaaccgtctgtgcgagcgtgtgctcggctaccgcatctttagcgatgccgaaggcaagatgaatctcaacgtgcaacaggcgggcggcagtgtactggtggtttcccagtttaccctcgccgcagataccgaacgggggatgcgcccaagtttctccaaaggcgcatcaccggatcgcgcagaggcgttatatgactatttcgtcgaacgctgccgccagcaagagatgaacacgcaaacaggacgcttcgctgccgatatgcaggtatcgctggtcaatgatggccccgtgacattctggttgcaggtatgagcctgcttccagggttgtcacgggaaacaagagagagtatcgctatgtatcaccttcgggttccacaaacagaagaagagttagagcgttactatcagtttcgctgggaaatgttgcgtaagcccctgcatcaaccaaaaggttcggaacgcgacgcgtgggatgcgatggcgcatcaccagatggtcgtcgacgagcagggtaatctggtggcggtaggccgattgtatattaatgccgacaatgaagcgtccattcgctttatggccgttcacccggacgtgcaggacaaagggttaggaacgctgatggcgatgaccctggagtcggtggcgcgtcaggaaggcgttaagcgcgtgacctgtagcgcccgtgaagacgcggtggagtttttcgccaagctgggattcattaatcagggggagatcaccaccccaactaccacgccgattcgccattttttgatgattaaacccgttgccactctggatgacattctgcatcgcggtgactggtgcgcgcagctgcaacaggcgtggtacgaacatatcccgttaagcgaaaaaatgggcgtgcgcattcagcaatataccgggcaaaaatttatcaccaccatgccagaaaccggtaatcagaatccgcaccatacgttgtttgccgggagtttattctcgctggcgacgctcaccggttggggacttatctggctgatgctgcgtgaacgccacctcggcggaacgattattctggcggatgcgcatatccgctacagcaagccgattagcggtaaacctcatgcggtagccgaccttggtgccttaagcggcgatctcgaccgtctggcgcgcggacgaaaagcacgggtgcagatgcaagttgaaatctttggcgacgagacgccgggtgcagtgtttgaaggcacgtatatcgttctgcccgcgaagccatttggcccgtatgaagagggcgggaacgaagaagagtagcttatggagaggggcggtgctgcctctctcattcattccggtcattggtaatgactccaacttattgatagtgttttatgttcagataatgcccgatgactttgtcatgcagctccaccgattttgagaacgacagcgacttccgtcccagccgtgccaggtgctgcctcagattcaggttatgccgctcaattcgctgcgtatatcgcttgctgattacgtgcagctttcccttcaggcgggattcatacagcggccagccatccgtcatccatatcaccacgtcaaagggtgacagcaggctcataagacgccccagcgtcgccatagtgcgttcaccgaatacgtgcgcaacaaccgtcttccggagactgtcatacgcgtaaaacagccagcgctggcgcgatttagccccgacatagccccactgttcgtccatttccgcgcagacgatgacgtcactgcccggctgtatgcgcgaggttaccgactgcggcctgagttttttaagtgacgtaaaatcgtgttgaggccaacgcccataatgcgtgcagttgcccggcatccaacgccattcatggccatatcaatgattttctggtgcgtaccgggttgagaagcggtgtaagtgaactgcatttgccatgttttacggcagtgagagcagagatagcgctgatgtccggcagtgcttttgccgttacgcaccaccccgtcagtagctgaacaggagggacagctgatagaaacagaagccactggagcacctcaaaaacaccatcatacactaaatcagtaagttggcagcatcaccccggtcatttacatcattccctgtctatgccggtaatattgaataagaactctataaatttttattcttcgttggcaccatacgtgtcttgctacatcactgttcaggagcatttaaatattatttgtagagctgagtggcaattatagcagataatgcttaactcatcatcttagttcaggtttgagcgatttttgatagtcaaaacctcctctggtgccatacttttctcataaatatttttaaaatctatagctcacaaacattatgcaaagataatgggctggcatcattgtcagtatcattcatttactgctctgtatgttatgaatcattatgttgtatgtttgctcttaaaccgtgggaaggaggctataatggttgccaatattaatctcattaaacaagaaagttattctgttgttaatttagaaaaacaactttcccgaactgttaccaacaaaattataacgatgagcaagtaaagaccggttggtggcagtactgaccggtctgtgatgaaagattaatttcaccttaaatcctggtgctgttaggatgctgacgtttttcggctacaccattcagattatgcaaataaatatccctgaatataatatattcatagcacccataactcatcctgggcgataactaaaccatttttgagtaataaatgaaacaactgcaacgctcttattatttctggaaaacgcctcgcaaaaataaaaaatgatgcgtaaatgagctttctttaaagattcggcaagggtacttttctctccatagattcaaaaatgatattggcgagatatttatgaactctctggcaggtatagatatgggcagaattttactcgatttatcgaatgaggtgattaagcaacttgatgatctcgaggtgcagcgtaatcttcctcgtgcggacctattaagggaagcggtagatcaatacctgataaatcaatcgcaaacagcaagaaccagtgttcctggcatctggcaagggtgtgaggaagatggtgtcgaatatcagcgtaagctgcgcgaggaatggtaatgggaaaaaatgatgtcaatcagattgctgacaacgtgcgcgttgttcatgccggatgcggcgtgaacgccttatccggcctacaaagtcatgcaaattcaatatattgaagtttattggtaggcctgataagcgcagcgcatcaggcaatcatacgcttgtcatcagtgacatacccataaccttatcgatgtgttggagggaagaacgaggcaaacagacaattgcggcatgatcttgaatgggtaacgcggaatacgagagatggtgtcgtcacaccctatgagctgtaatccgggcgacctgcgccacccggaaaacgtcagagattactctccttcacccggaaacaggaacgggttaatggaactacgggcgtagccttcttgctccattcgcgcgtccagtaccagagaggcgaggtcatctgccacggcttcaactttcggttctttttcctgataaagaatcttcaggtaagtgccgcagtcatcgcagctttcggctttaatcgcggcctgttcgtcatccagcgaccagtaatgcagtttgccgctctgctcgcagttgctgcattttacgcgcactacgtgccattcggtttcacacaggttgcagtgcaggtaacgcagaccctgagtggtgccaatttgcaccatgctggacaccggcatagagccacataccgggcaatattgacgttgttcgccgtattcagcgcgggctttgccggggatcagattggccatctgcgcccagtagagcgacagcgcagcccagataaacggcgctttatcgctgctgacggacgagaaatcagaggcaaacagcgcgctggccatatcttccagctcctgagtcgatgccttctccagattctcaatcactgccagcgccgggccgctcatttcaggtttcagctcagcaattagcgccatcagcagcttttgccagtgcttatcacgcggcagaacgtgaatatccagcgggggcttgccctgtgcgctggcttctttaatgcgcgcggtcagatccatctccagcggatggtcgtacagcaccacttcctgggcgtgggcgataagcgcagcaaagcgcaggtaatcacccagcggattattttctgccagctcgcgcagacgctcggcgcggcggttgtataaattcttgagccgagggaacaataacggcggaatcatatccgccgtacgtttctcgctcgaacccagctcatcttgcgggattatgcgaatactcattcagctttcttttccgttgtcttgcggacctcacggtaccagcgcgggtgatgtttcttcgcccaggcgctggtaacccatccttccaccatggcggtaatcgtgcctttcacccaaagggcggcgtagatatgcaccatgataaccacaattaacgccactgcggcaaatgaatgcagcattaacgcgaatcggatcaccgggattgagaaagcaggcgcaaaataaggacgccagataatcacgccgctcaccagcagcagaaccaggaaaataatcgccgcccagaaaacgcatttctgaccgaagttataacgcccggtgtcacctacttcctcgttgacgacgatcttacgaatattcttcgcccaaaagatatcatcccgattgattaggttgtgatgccagtaacggaaaaacatgatgatgaacgaggcaaacataaccacgccgacaaacgggtgcagaattcgcgccagctgcggtgtgcccatgatttgcatcaaccagttgaaggacgggaacaaaaagcccagcccgctcaccgccgccaggatgaagcagaaggcggtgatccagtggttgatacgttccggcgcggtgtagcgcacgatggtgtcacgtcgtttcatttgcgctcctcgtctttctcttcgtgcagattattctcttcctcatccgcacggttcggaccgacacccacgtagtggaagatactggccgcaaaggtagccgcaaagccaacagccgcgagcggtttccagatgcctttccagaatttcacggtttcgctgatttccgggttctccggcaagccatgatacagatttggcttgtcagcatggtgcagcacgtacatgacgtgtgtaccaccgacgcctgccggatcgtacagacccgcattgtcgtaaccgcgggttttcagctcagcaacgcgctcgctcgccagcgttttcatcgactctttcgtaccgaagtgaatcgcgcccgttgggcaggtcttcacgcaggctggttcttgcccaaccaccacgcggtcaacgcacagcgtacatttgtagacgcggttgtcttccgggttgaggcgcggaatgtcgaacggacagcccgcaatgcaataaccgcagccaatgcactgctcggactggaagtcgacgataccgttggcatactgaataattgcaccttccgccgggcacgctttcaggcagcctggatcggaacagtgcatacagccgtctttgcggatcagccattccagtttgtcgttctgctccacttccgagaagcgcatcaccgtccacgatttggcgcttaaatcattggggttgtcgtacaccccaatgttattgccgacggtatcgcgaatgtcgttccactctgaacacgccacctgacaggctttacagccgatacaggtggtgacgtcgatgagtttcgccacttcttcctggaagtcccgcgcctgaggcgcgggggtcagaccgttagtcgcggaacgacgaatgatatcttgcgattgataagccatatgtcgtctccgttacaccttttccacattcacaaggaaggacttaaactccggcgtctgcgtgttcgcatcaccaacgaatggcgttaacgtattggcaataaagccttttttagctacgccttcatagccccagtgaatcggaataccgatggtatcgatatctttgccgttcgctttcagcgtgcgaatacgtttggtcaccaccgctttggctttgatatagccacggttggaggagactttcacggtatcgccctgggcaatgccaagtttattcgccagcgactccccgatttccacaaactgctctggttgcaaaatcgcgttcaacagcgcgtgtttggtccagtagtggaagtgctcggtcagacgataggtggttccgacatacgggaacttatcggctttacccaatgcttcggcgtcgtctttaaagattcgcgcagccgggttcgagataacgtttggatgcagcgggttagttcccagcggcgtttcaaacggctcgtagtgttccgggaacggaccttccgccatcttatcgagggcaaacagacgccccatgccttcctgctgcatgataaacggcccgacgccgctgcccggaggcgctgcgctgtagtccggaatatcccagccggtccacttagtgccgtcccatttcagcaactgacgcttcggatcccacgggttaccctgcggatctgcggaggcgcggttatacagaatgcggcggttaagcggccatgcccatgcccagcccagcgtgttaccgaggccagacggatcggcgttatcacgacgcgccatctggttgccttccggcgtccagctaccggcgaaaatccagcagccacaggaggttgtaccgtcatcgcgcaattgggcgaacgagctaagttgttggcctttcttgacgataaccgcaccggttgccggatcggtaatatcggccagcgccttaccgttgctctccatcgccacttcttccgacttcggctcatgcggaatggcgtagttccaggtcatgttcagcacctgatccgggtttgcgccaccctgttcggcatacatcttgcgcaagcgcaggaagataccggagaggatctcgccatcagtcagcgcaatccctggggcgtccgcacctttccagtgccactgcaaccagcgacctgagttaacgattgaaccgttctcttctgcgaagcaggtcgatggcagacggaacacttcggtctggatcttcgacgagtcaacttcgttcagctcaccgtggttctgccagaagttagaggtttcagtgttcagcgggtcgatggtgacgaggaacttcagtttcgacagacaaccgatcactttgtttttgttcgggaatgaggcaacagggttaaagccctggcagatatagccattgaccttgccctctttcatcatctcgaagtattgcaggacgtcgtagcctttatcccacttcggcaaccagtcaaagccccagctattttccgccgtcgctttatcaccaaagaaggccttcatcatagagacgaagaatttcgggtagttgccccagtagtttacctggccttccagcagcggttttggcgtgttggcggtaaggtaggtttgcagatcggtctgcttctcgcttggcagcgtcatgtaacctggcaggctctgcgacagcagccccaggtccgtcagcccctgaatattggagtgaccgcgcagggcgttaacgccgccgcctgccatccccatattgccgagcagcagctggatcatcgccatcgtacgaatgttttgcgcaccaacggagtgttgcgtccagccgagggcatacaggaacgaggcagttttatcgtgagcactggtttctgcgatgtattcgcagactttcaggaacgcgtcttttggcgtaccacagatgttttcaaccacatctggcgtgtagcgggaaacgtgctgtttcagcaagttccacacgcagcgcggatgttgcagcgtggtatcgcgtttggcgaagccgttttcgtccagttcgtaagtccaggaggatttatcgtacttgcgtttttccgcgtcatagccggtgaacaggccatcttcaaagccgtaatcctcacgcacgatcaggctggcgttggtataggcttcggtgtattcgcggttgaatttttcattgttcagcaggtacagcaatacgcctgacaggaaagcaatgtcagtaccggaacgaataggggcatagtagtcagccaccgccgccgtacgcgtaaagcgaggatcgatcacaatcagcttcgcgccattgtgaattttggcttccatcgcccagcggaacccgaccgggtgagcttcagcggcgttaccgcccatcaccacgacgaggttggcgttcttgatgtcgacccagtggttggtcatcgcaccgcgaccaaatgttggagcaagacttgctaccgttggtccgtgtcagacacgcgcctggttgtcgaccgcgagcatacccagcgcgcgggagaatttttgcgttaaatagccggtttcgttactcgacgcggaagcacacagcatcccggtggagagccagcggttaacagtcacgccttcggcgttttgcgcaatgtagttagcatcgcggtcttctttcatcagtttggcgatgcgatcaaacgcctcttcccaactgatttgctgccatttatcagaacctggcgcacggtattccggaaacttcagacggctttcggagtggatgaaatccaccaggccagcgcctttcggacaaagtgcaccgcggttgaccgggtgatccggatcgccttcgatatggaagatagatgctttggcgttttttgctccgtcaccgaggctgtacatcaacagcccacagcctacggaacaataggtgcaggtattacgggtttcgcgggtgcgcagcagtttatactgccgggtttccgcgagtgctacgctgggtgcaaaacccagtgccgctgccgtggtgcctgccataccgccagcgcagatcttaaagaactgccttctgctgacctgcatggattgctccttgtttcgacattgtcacgtcccatttacattcgcttgctgcgtgtgcagggagtgggagttatttttctttgcggaaggggccgcaaaggtccagaattggctcaatttccctccatccaggaagggtttgtaacagaataccataatgttggtgtgtgtgttcttatctggttaagagaaagtgaaaaaaacacagcgaaaagaaatcgaaaatgtgacaaatatcacaggtgttcgtcaaattgagttatggcggcgtgatgatttacaacacccacggttagatgaggtcgcggaagaagttcccgttgcgctggtctacaacggcatttcgcatgtggtgatgatggcgtcgcccaaagaccttgagtactttgcgctcggtttttcgctttccgaggggataatagaaagtccgcgcgatatcttcggcatggatgtcgttccttcctgtaatggtcttgaagtacaaattgagctttccagccgccgctttatggggttgaaggagcgccgccgggcgctggcgggacgtacgggctgtggcgtatgcggcgtggagcaacttaatgacatcggaaaaccggtgcagccgctaccgttcacccagacgtttgatctcaacaaactggatgatgcattacgtcatctcaacgattttcagccagtggggcaactgactggttgtactcacgccgctgcctggatgttgccatctggcgaactggtcggcgggcatgaagacgtgggtcgccatgtggcgctggacaaactgttaggccgccggtcacaagaaggggaaagctggcagcaaggtgcggtactggtttccagtcgtgccagttatgaaatggtgcaaaagtcggcgatgtgcggcgtagagattttgtttgcggtgtctgccgcgaccacgcttgctgtagaagtggctgagcgctgtaatctgacactggtaggtttttgtaaaccgggtcgggcaacggtttatacccatccgcagcgtttgagcaattaattaaaataagtcctgcgatatatattaaattgcaggacttattcatttcgtgaattttattattttatttataaataaaacgcgtgtagtgacgttttcttttttcatttattatgttcactctcttatctatatatttataaggcaattaaatgaaaaggaatttattatcttccgctattatagtcgccatcatggccctcggtctgacgggttgtgatgataaaaaagccgaaacagaaacgcccccgcctgccaatagtcaacctgccgcaccagctcctgaagctcccgttgcaaaagcagaagctaaacctgaaacacctgcgcaaccggtggtcgatgaacaagcggttttcgacgaaaaaatggatgtctatatcaagtgctacaacaagttacagatccctgtacagaacagtctggcgcgttatgctgactggctgaaagattttaaacaggggcctaccggtaaagagagtactgtttatggcatctacggcattagtgaatccaacctcgctgagtgtgaaaaaggcgtaaaaagtgctgtggcgttaacgcctgcgctgcaacctattgatggcgtggcggtgagttatattgatgctgccgtggcgttgggtaataccattaacgaaatggataaatattacacccaggaaaattataaagacgatgcgtttgcgaaagggaaaacgctgcaccagacattcttaaaaaatctggaatcctttgaacctgtagcagaatcttatcatgcggcgattcaggaaattaatgataagcgccagcttgcggaactgaaaaatattgaagaaagagaagggaaaacattccactactactctctggcagtcatgatttcagcgaaacaaattaataacctgatttcgcaagagaagtttgatgttgatgcggcaatgaagaaagtctctgaactggaaacgctggtagcgcaggccaaagaagcggataaaggcggtatgaatttctcgttcattaattcggcagaccagtatcaactcgagactaaaaaatatgttcgccgcgtcagagataaagtcccgtactctgactgggataaagagcatcttcaggatgcaaacacaagctggatggtcgaagactcatttccacgagcgttacgcgagtacaacgaaatggttgatgactataatagcctgcgttaaacgtttttgatgataaatgcagtgtcggatgcggcgcatccgacacagttcaccccttgtgaagtaactccataaatgcctcatatcctgttaacccggcaataacttctgccggatgctgacacaatacgcttgccagatagctaaatatttttagctcatgacgcgcatcggcggcggcgcaggcgatcaagacatggttaatgacttcgttattcacctcaactggttgggcgagggtaataaaaaatccacgaaaacgtcgctcctgttcgctccagcaatgtgggatggcgaggcgattaacaatcaggttttcaccttcgccttcgcgggcgatgatccgttgcgcttcatcggcggtaatatggtgttgtgccactaattgcgcacaaatttgccgggtaatatgttgccagctttcaccgcgtacattcgaataatgaaaacttccgggggcagagaaaaagcgttccggctgttggcgaataaatgccgtcgccagaaagtgttttatttgttcgatatcggcagccgtaatgatattttttacggtgatgtaattatttaccgcgtcatccagtaaataatggctgttgttaatgatcaataacggctcaatctcttcgcgaatggcaataagctcgcttaagctacgggcaataatcacccgacaatgtaaaacatcgcgctcaatggcgagctgattaatagtggcaatcgcgttctggtccgagagcaaaatgatcggctggcgttcgttttgatgccgttccagcgcacaggcaaaatacaaaccgatcagatcgctatcgaaaaggggaatatcgagctgttcacgcagtagcgtaataaagtgcagactcatatcaaaggccgcaggccaggcggctttcaggttattcatgctgctttggcggtgctcggcaatccacaccggtgcggcaaggcaacgtaataaatgcccggtaatattctcaaccagctgcgtatcaataatattcaatgacgcgatgcctggcaccctttgcagcaaccccagcacatgatcggctgaaattacctgcgcttgctgatgctgtttctctatcaaacctgtcagggttcttacagcgttatcaccaagaaacatgccgctctgttcaacgatttgttttatctcgttaccgggatattgcggccactcatcggtcagttgattacgcagggcgtaaatcgccagaatcaggctggagagataatcaccctgcatgagcggccagcggtgttggttgtcgcaggccgtggataaatgctgaaaattgtctcgtgttacgcccgccagcggaattaaaaacggatctttgcgcagcaagttcgccagcaagataacgcgtttctcttctgtctcatcaatgaaatggcccaaaccggggcgactggccaggcaacaagtgcgttcataacgctgttttaaccggggcagacgctctgctacccaggtttctggcaaattaagcgccgaggcgagttgcgcacggggagtaaaggtattcagtaataacagcgccagcagccgatcgtcgttatcgtgcttttgcagcaactgaaaaaagctgcggcgctcgaagatttccagctgatagcccgcactgccactggcgaaaatgcgggctttgccgttaagggtaaagttgagatagtcaatatcacgcaggatggtcctgcctgaaacgccagtctgttgcgccagctcaccaggcgtgcgcggctgttgctccagcagatcgacaatctttaactggcgttcgtttagcattaatccacctgacggaactggctaaacgcgttgactttctccgcggttaaggtggtcagaaaatcccgtatcaacgtgagcagagcatcgtaatcggcttttgaaatcatgccgctgttagcgtgcagatagcgggttggcaggcacagcgcaacaaccggacgcccgccgcccatcacgttgtagcgcccgccatccgtcgcaccggttttcatggtggaaaattgcagcggtaaatcgttatgtgcggcacagctttttaacgccgccaccagtttctggttggggaagtagcgcttgtcaaacagcatcagccccggcccctggcccagtttcagcgggtatttaatgttatcaatgcccggaacatcacctgcgacagcggtatccagcacaatcaccacatccggtttaatgtgttccgccgaggtttgtgccccgcgtagcccaacttcttcttccacgctgccgacgccatacagcgtaatttcgggattattcaccgtctgcaatagttcagccatcattgcgcagccgatgcggttatccagcgccttgccgaccactttatcttcgccccagcaggcaaaattggcttccgggctaataaaatcgcccatcgccacaccgcgtttttccacctcatcgcgactgttcgcgccaatatcaatgaacatctcatcaaatgacagcggctgttgcttttgcttttccgttaacgcatgaggtgcgacggaaccaatcacaccagggattttaaatcccttgtgtgtgcgtatggttacccggtggttgagcattgactgattccaccagccgccaatggtggtaaagcgcagaaaaccgctctcgtcgatgtgggtgaccataaagccgacttcatccatatgcccgacaacggcaacttttggacctttattccccttacgggcaacaaagctgcccagaccatcaaaggtgatctcattaacgcaaggttccagcgtgtttatcagaatgtcgcgaacttcctgttcatcgccgctgacggcgctggcttcgcacaactgttgcagtaactcaatgttcatggacaagctcctgttgcgcggctttcgctttgcggcgtaaccacaatcctttcaggacgataatgaatgaaatgttcagcgcgaggccaatcgctagcaccagataaaacgaacccaccggcgacatcaggccgatcagcgggtcaaagatacccaaaccaggtgccagacgtttgattccgaaagcgatcaccagcacgccggtaatgccacccgccagcgtattggcggtaatcatcggcaacggagctgccagagcgtaaggtatagccggttcggttgcgactgtggcaccgaccacaatggcactactggcagcctctttttcctgtcgggtaaacagtttgggcgcaatgaacgtcgcaagacccgccgcaacgggcggcatcaacgcgacaacgccgacgatggcgtaccagtcataaatgtgtttttccagcagtgagaagcagaagaaccaggcggttttattgatggggccgcccatatcgaacgccagcatcgcaccgaccagaaacgctgccgcaaacttcattgatggaggaatggtattcaggaagtggagcagcccgcccatgaggtcggacatcaccggcccgataacgtagtaagtgagcacgccgaaaaccagcagagtaacgaacgggatcagcattgaaccgagcagcggttgtaatgctttgccaaggcgcactttgcggaaccagaagacgaaatagccaatcgccagccccagcaccaccgcgccgaggaatcccgcacccgactgggtgccgagcagcgctttgtcgttcgccagatagcaaaccagaaacgccggagcgaaagccggtttatcggcaatcgacgaggcaatataagcgcccatgatggggatcataaaggtgaagccaaggtaaccgatggattcaactacccaggtaaacgacggcgcgcctttcgacatatcggtatacggcaaaccgaactgcaccagcatgttggcaagcgccaccaggataccaccgccgatgacaaacggcagcgccgcagagacgcccgccatcaggtggctcatcacgctgccgctttgcacttcctgtttgccaagcttcacgccgctatctgcggcaaaaagctgcgagtttgtcggtaattcgctgaaaatctggtcgatatttttcaacgcctgggagatggcaatctcataaactttcttcccggcaaaccgcgcgcgatcatcaccgctcaggccacgcccggtagcgagaatgacgtaatcggcagcggcaatctcttcgctggataagcggttttcaacgccactggacccttgagtttccacttttatggtatggccgagagaacgggctttctgttccagggcttccgccaccatgtaggtgtgagcgatcccggcggggcagttggtgatcgcgacaatacataaggatgactccatcgccacttccttatgagctgagggtttgatttaacaaggcaagcacctggtcggcgtcgccctgttgcagttgatgaataaaatcctggtggataattttgcgacacagtgtgccgatgattttgacctgatcctcttcgccgctttgcggcacgccgaggcagatccagcaattgacgtcttcgccatcgctggctttccagtcaatagcctgcgctttgcgggcgaataatacaaacggttgtttaacgcaggcgcttttaccgtgcggcacggcgacaccggaaccaaatccagtagagtgcattttttcgcgcagcagcagggtttgcaggaactggtgtgagtcggtgataaaaccgttttgtaacgctattgtcgccaactgcttcagaacggaataagcgccattgccctgaatattcaggtcaatacagcttgcagtaagagctgccattaatcggactccataaaatatattttaatcaattgtaatggtggagcgattaagtgatgagaggcgatatgtcggtaaacaatgacaatttgagacagagtgaaaggtcagatttgcggagtaatgcacataatggttatttaaataaaccacatgaatcattaatgggttattcattatttttgtgatttactcacaatgtatcagggaaatataacttaccgggagatgtaatatgtttaatttttcaaatcgaaatttaaaatattgtgccggaggcatctctggcacattgggcaattacggcaggtaaaacacttcttgcagctcgctactcaccgggctgttatccgggttagcgggcataacatcggtcatatatttccaccaacgttggcaaacatcagtgctggctaccgcattccaccgttcttcagattcaatctctaccgtggcaaacagcagattacgcgctttgtcgaggtaaatggcgtagttatgcgcaccgtgagatttcaacactgcttccagttccggccagatggggttatgccgacgctgatactcttcgtgggcgtcggggttaacctgcatgacaaaggctttgcggatcatgtttgctccttacagcgccagcgcactagctagtggtgtaacgccgaagcgcttgccgagcgctatcaactcttcacggctgatggtctgtttcatgccgcccatcgaataaaccttcactaatacttgtgctgatttttctgcggtgtcgattaaaccgaatgtttcatccaacgtcgacccgctgccgaagacgccgtggaagggccacaacaccagcgaatgtttttgcatctcttgtgcggtcgcctggccgatttcgtccgtgccgggcaccatccacggcagaatgccaacgccatccgggaataccaccagacactcggtgctgccttcccacagttggcgagtaaagaccgcggtgtcgttttcaagtacataggtgagggcgatcaggttggtggcgtggcagtgcatgatcacccgatctttaccgttggtggctttaatgcgctcgcagtgggaaaggaagtgagccggaagttcggaagttggaacggcttcgttggttaacccccagagaatatggtagcccgcgccgtcgctgtcgacttttacgacgcctaagttagctgcaggatcaagctggacgttacggaagaatttgccggagccggtgacaataaacggcgtatttgccagtaaaggcatgggttggctgaggggaatatagcgcggttgtgcatgaaagttgccgtgataaggcgcgatatcggcgtcatccaggcgcagcgtcaggttaccaccattgcgctcgtcccagcctttcagccaggcatcggtggtggctttgatcattccctggacaaaccaggactgggtaatgttttgcatgttctgtgttcctgtaaattaggttgccttgtttagacatggtgcggcttgttcccctcaccctaaccctctccccgtaggggcgaggggactgtccggagcggtgttcagctccgttgccgcacgaggctatgtttttctccctcgccctttcagggagagggccggggtgagggtggcagcacgcatggtcattcgacctgtaggccggataaggcgctcgcgccgcatccggcagtgtttacccacgctggctcaaaatcgctttctcataagcccgcacgctctccagccattcgctacctgctggcgtatcgtgacgttggcaatacatttcccagaccgcctgccacggcaacgatttctgttcttccagtagcgccagacgcgcagtgtaatcgcccgccgcttccagcttgcgcagctcagcggtaggttccagcaacgcacgcagcagggcttttttcatattgcgtgtaccaatgacccacgcggcaatgcggttgatagaggcatcaaagaagtcgaggccgatatgcacccggtcgaacagatcgtgacgaacaatctcactggcaatcgcctgggtttcatcatccagcagcaccacgtgatcgctgtcccagcgaaccggacggctgacgtgcagcagcaactgcggtacatacagcatggcggcggaaatcttgtcggaaatcacttcagtcgggtggaaatgcccggcgtccaggcacagcgcagtctggcggctggtggcataccccatgtaaaactcattggagccaaccgtgtagctctctgcgccaatgccaaacaatttgctctcaacggcgtcgatatggtgcgccggatccagcttctcgctgatcacctcatccagtgctgccagcagacgctgacgcggggcgagacggtcaacggtgatatctttcataccatccgggatccagatgttcatcaccgatggtgtgccgagttgctcgccaaaataggccgaaacgcgacggctggctttgcagtgatcaatccagaactggcgaatgctgtcgtcgggatgcgagagcgtaaagccatcggcgcttagcggatgcgagaaacaggaggggttaaaatccagaccgagctgattggctttcgcccattcaacccagtttttgaagtgctcaggtttgatctggtcgcgcgagactggcgtgtctgattccagatagatggcatgtaaattaagccgtttcggccccggaatcagccgcatagcctgttccagatcggctcgtagctcactggcattacgcgctttgcccggataattaccagtagcctgaatcccaccggtcagcgaaccttccgggttttcaaaaccggaaacatcatcgccctgccagcagtgcattgaaacgggtaaacgatcaagttggcgcagcgcctcctcgacatcaatccccaccgccgcgaaacgctgtttcgccagctcccaggcctgttccagttgagtggtcatgcgcaaagctcctttgtctgtcgtgtcgagtgaagctgcgccacatagtgggcaatttcactgtcaggattaggggtaaaggtggtcagattcgcggtggtgctgacgacctgacggaaatcatccacattgttgagttcatccagcgtcattaactggatgccgatattgccgagcgtcgaggcttcaacaggcccggcgatcacccgaataccgcaggcatcggcacatagctggttgagcagcgtgttctggcagccgccgccgacaatatgcagttgcgagaaatcttcaccgcgtagctgcgccagctcatgcaacacatcggcatacagcagcgccagactgtcgaaaatgcagcgcgccagttcagcatcactttccgggagcggttgcgccatttcccgacacgcagcctgaatttcgctgcacatcgcctcaggattaataaagcgatcgtcattgggattgatgatgaagcggcaggccggaagtgcctgtgtcgcggcgataagcgccgggagatcgttgatttgccgctcctgaagcactcgctgaagcagccataagcccataatatttttcagcacccgatagcgaccttccgccccgccttcattggttatgttggctgccagcgccgtgtcattggtaaatggcgtctggctttcgaagcccatcaatgaccaggtgccagaagagagataagcagcgcgtgaaccgtttaacggcgaggcgataaccgcgctggcggtatcatggctggcaacggcgaccaccggaatctcattaccctgcgggcaaatccagtgcccaatgacattacccggatgcgtcgggcgaccaaaccaggctttgttagccccgctccacgccagtagcgactcgtcccagtcgtcgctattgatattgaccagttgcgtggtcgtggcgttggtgtactcccagttcatcttgccggtcaggcgatagctgaagtaatccggcatcagcagagcgtgagcaatgtgtggaataagttcaggttgttgctccgtcagcgcacgcagttgataaagcgtattgaagggcagaaactggatgccgctacgttgataaatatcgcgtttgccgagttgttgctgtgcctgcgccattaggccattggagcggctatcgcgataagcaacgggcaggcccacacgctgaccctgttggtcgagcagcacaaagtccacgccccaggtatcaatcccaatgctatcgatacgaatcccttcctcgcacaccttgtttaatccaaggcgaatggcactttccaggctatccacattccaggtgacataaccgttctggctatgcaggccattgttaaaacgatggatttcgcgcagcgtcaggctgcggcattcacgctcgtaacgcgccagcatcacgcgcccactggatgcgccgagatcgacggcgacacaattgcgaaaggtcataatgtgatcctgctgaatttcattacgaccagtctaaaaagcgcctgaattcgtgaccttctcgttactgacaggaaaatgggccattggcaaccagggaaagatgaacgtgatgatgttcacaatttgcttcattgtggtgatgtgatgctcaccgcatttcctgaaaattcacgctgtatcttgaaaaatcgacgttttttacgtggttttccgtcgaaaatttaaggtaagaacctgacctcgtgattactatttcgccgtgttgacgacatcaggaggccagtatgaccgtattacatagtgtggatttttttccgtctggtaacgcgtccgtggcgatagaaccccggctcccgcaggcggattttcctgaacatcatcatgattttcatgaaattgtgattgtcgaacatggcacgggtattcatgtgtttaatgggcagccctataccatcaccggtggcacggtctgtttcgtacgcgctcatgatcggcatctgtatgaacataccgataatctgtgtctgaccaatgtgctgtatcgctcgccggatcgatttcagtttctcgccgggctgaatcagttgctgccacaagagctggatgggcagtatccgtctcactggcgcgttaaccacagcgtattgcagcaggtgcgacagctggttgcacagatggaacagcaggaaggggaaaatgatttaccctcgaccgccagtcgcgagatcttgtttatgcaattactgctcttgctgcgtaaaagcagtttgcaggagaacctggaaaacagcgcatcacgtctcaacttgcttctggcctggctggaggaccattttgccgatgaggtgaattgggatgccgtggcggatcaattttctctttcactgcgtacgctacatcggcagcttaagcagcaaacgggactgacgcctcagcgatacctgaaccgcctgcgactgatgaaagcccgacatctgctacgccacagcgaggccagcgttactgacatcgcctatcgctgtggattcagcgacagtaaccacttttcgacgctttttcgccgagagtttaactggtcaccgcgtgatattcgccagggacgggatggctttctgcaataacgcgaatcttctcaacgtatttgtacgccatattgcgaataatcaacttcgttctctggccgaggtagccacggtggcgcatcagttaaaacttctcaaagatgatttttttgccagcgaccagcaggcagtcgctgtggctgaccgttatccgcaagatgtctttgccgaacatacacatgatttttgtgagctggtgattgtctggcgcggtaatggtctgcatgtactcaacgatcgtccttatcgcattacccgtggcgatctcttttatattcatgctgacgataaacactcctacgcttccgttaacgatctggttttgcagaatattatttattgcccggagcggctgaagctgaatcttgactggcagggagcgattccgggatttagcgccagcgcagggcaaccacactggcgcttaggtagcgtggggatggcgcaggcgcggcaggttatcggtcagcttgagcatgaaagtagtcagcatgtgtcgtttgctaacgaaatggctgagttgctgttcgggcagttggtgatgttgctgaatcgccatcgttacaccagtgattcgttgccgccaacatccagcgaaacgttgctggataagctgattacccggttggcggctagcctgaaaagtccctttgcgctggataaattttgtgatgaggcatcgtgcagtgagcgcgttttgcgtcagcaatttcgccagcagactggaatgaccatcaatcaatatctgcgacaggtcagagtgtgtcatgcgcaatatcttctccagcatagccgcctgttaatcagtgatatttcgaccgaatgtggctttgaagatagtaactatttttcggtggtgtttacccgggaaaccgggatgacgcccagccagtggcgtcatctcaattcgcagaaagattaattcgccatgccgatgccgacgatgttagcggcgacaataatcaccacacaaccgaggctcaacaccgttaccggacggcgtcctgtattgttccactctttcagcaccagcccgacgataccgccgcacaatacatagaaactcatatgcagcatccaactgatgtagtcatactgcgccggaatgcgggcgtggccccaggcatagaaaaagaattgcagataccacatcaacccgcccagtgccgagagtaacacattgtgaatgatcagcggttttgccagcgagaagtcggcttttagcgacaaatccttcacttttgccagacgaataaaacagaaaccgaggttaatgatcgcgccgccgcccatgatgacaacatagcttggcagagcgacatacagtggatcgacgccaagtgcggcagcggcttcatgcatcggttttgcggcgttcatcgcaaaggacatcccggcagagaaaatgccgcacatcaccgccagcaccagcccttttttcagattgaactcttcggctttaatgcccatcttgcgctctttcaactgcccggctcgagttacaatccctacgccaatcagcgccaccagaacgccgagcaacgtcatgcgtccgccttcggtgttaatcagcacatcgaaattgccgttgataattggcgtcatcagcgtaccgacaatcaacgtaatgccaatggcgatgccaattcccatcgacatgccgagataacgcatggtcaggccatagttgatattaccgatcccccacatagcgccgaacagaaaaacaggcagcagcgtagagagactaaacgagctgtaatacgcccagaaatccggtagtaacagggcgctgatggtccacggcagaataatccacgaaacaatcccaccgactgaccacatggtttcccatgaccatttttttacttttttgaacggagcgtaaaaacaggctgcactggccgcgccgatcaaatgccaaaatatccccatcgtaatcgcgttactcatcttcttatcctcatcatttttcgtcgcttcacatctccgacgagatgagtgtaaaaatcgtgctgtcgattaacctttcgcctgttgccgccgttgtcgatttactggcaatcacggcattaagtgggtgatttgcttcacatctcgggcattttcctgcaaaaccatacccttacgaaaagtacggcattgataatcattttcaatatcatttaattaactataatgaaccaactgcttacgcggcattaacaatcggccgcccgacaatactggagatgaatatgagctataccctgccatccctgccgtatgcttacgatgccctggaaccgcacttcgataagcagaccatggaaatccaccacaccaaacaccatcagacctacgtaaacaacgccaacgcggcgctggaaagcctgccagaatttgccaacctgccggttgaagagctgatcaccaaactggaccagctgccagcagacaagaaaaccgtactgcgcaacaacgctggcggtcacgctaaccacagcctgttctggaaaggtctgaaaaaaggcaccaccctgcagggtgacctgaaagcggctatcgaacgtgacttcggctccgttgataacttcaaagcagaatttgaaaaagcggcagcttcccgctttggttccggctgggcatggctggtgctgaaaggcgataaactggcggtggtttctactgctaaccaggattctccgctgatgggtgaagctatttctggcgcttccggcttcccgattctgggcctggatgtgtgggaacatgcttactacctgaaattccagaaccgccgtccggactacattaaagagttctggaacgtggtgaactgggacgaagcagcggcacgttttgcggcgaaaaaataatcatttgccgcctgctgcaatgaggcgtataggccgcatatcagcttaaaaaatgaaccatcgccaacggcggtggtttttttgtgatcaatttcaaaataaaaacaatgatccgataaaaataaaacagcgtttcaattgatgtggttttgatcacttttattgattaaatgaatgtctatcttcgtttccatcaacactgatgctccattgaggaattacgcatcagcccttaaaaatatgccgacaggtgatggaaatgcagataaaacgctcgattgagaaaatcccgggggggatgatgctcgtcccgctattccttggcgcactgtgccacaccttctcgccgggggcggggaaatattttggatcattcaccaacgggatgattaccggtacggtgcccattctggcggtgtggtttttttgcatgggggcgtcaataaaattaagcgcgacgggaacggtactgcgtaaatccggtacgctggtggtaactaaaattgccgtcgcgtgggtggttgcggcaattgcctcgcgcattattccggaacatggtgttgaagttggattctttgccggactttcaacgctggcgctggtggcggcgatggatatgaccaacggcggactttacgcttccatcatgcagcagtacggtacgaaagaagaagctggggcatttgtgttgatgtcgttggagtccgggccgctcatgacgatgattattctgggcactgccgggattgcctcgtttgaaccgcatgttttcgtcggcgcagtattaccgttcctggtgggctttgccctggggaatcttgaccctgaattacgagaatttttcagcaaagcagtgcaaacgctgattccattctttgccttcgcgctgggcaataccattgatttgactgtgattgcccagactggtttgctggggatcctgttgggtgtggcagtaattatcgtgaccggtattccgttgattatcgccgataaattgattggcggtggcgatggcactgccggaattgccgcttccagttccgcaggggccgcggtagcgacacctgtgctgattgcagaaatggtgcctgcgtttaaaccgatggctccggcagcaacttcgctggtagcgacggcggtcattgtgacttcgattctggtgccaattcttacctctatctggtcacgtaaagtcaaagccagagcagcgaaaatcgaaattttaggtacggtgaaataaacctgcttccttaatccccacagccggatgaactaacgttcgtccggtttgctattgagttcctgcctggatacttaccgcgaaaacagcacgcctgacataaaataaatatggtctaatggggaaatttctcgtggagagggaacagatgcgatatccggttgatgtatacacaggcaagattcaggcttatcccgaaggcaaacccagcgcaattgccaaaatccaggttgatggtgagttgatgctgacggagctggggctggaaggtgacgagcaggcggagaaaaaggttcacggcgggccagacagagcgctgtgtcattatcctcgtgagcactatctctactgggtgcgggaatttccggaacaggcggagttgtttgttgcgcctgcgtttggcgaaaatctctcaaccgacggtctcacggaaagtaatgttcatatgggcgatattttccgctggggagaggcattaattcaggtcagccagccgcgctcgccttgctataaactcaattaccattttgatatcagcgatatagcgcagttgatgcaaaacacaggtaaggtggggtggttgtatagcgtgatagcgccagggaaagtgtctgcggacgcgccgctggagttggtttcccgtgtcagcgatgtgaccgtgcaggaggctgccgccatcgcatggcatatgccgtttgatgacgatcagtatcaccgtttactctccgccgccgggttatcgaaaagctggacgcggacgatgcaaaagcgccgactgagcggcaagatcgaagatttttcccgccggttgtggggaaaataacccccggagtgtaggcctgataagacgctatcagcgtcgcatcaggcatcctgctcaaatgccggatgcggcgtaaacgccttatcctgcctacaaatgcggagtttaactccgcttatacagcggcaaccaaatcaccagccgtaaaccgcccagcgggctgtcttctgccttcacccagccacgatgctgctgaatggcggtttcaacaatcgccagccccaatcctgtaccgccagattcacgatcgcgtgcttcatcggtccgatagaacggacggaaaatctgttcgcgatcttccgggctaacgccaggaccatcgtcgtccaccgtaatggtgataccgtctttatctaccgcaaagcccacttcaatcttcgtatgggaataacgcagagcattacgaacaatgttttccagcgcactttccagggcgttcggattgccgtacagcggccacggcccaggcgggaagttaactgtcaacgacttgcccatttgctcggcttcgaacgccgcgttatccagcacttcactccacaactggttggctttgatggtttcgctaaccagcgcgtttttttgctgattacgtgacatcaccaacagatcgttgatcatgctgtccagacgttgcgcttcggtttcaatacgctcgagttccttgctttcaccgctacgacggcgcagtaacgccgtacccagttgcagacgcgtcagcggggtgcgcagctcgtgagagatatcagaaagcagacgctgctgagaggtcatcatgcgctccagcgcggtgaccatctggttaaaactggcacctgcggcaaggaattcctgtggccccgcttccagttccgggtgctggcgtaagtttccctgggcaacttcatcggcagcgtttttcagcttacgcgccggttttgccagactccaggccaaccacaacagcagcggcgtactgaccaacatggtgacaatcagcagtaatagcgggcggtcaaacagtaagttaatgaaatcggattgagaactgctggccggacgaatcagataaagttggtaattatcttcgccatcacgcacggagaacggaccgaccagttccacgcggccatactttttcttctgcggatgatcggcgttatcggcctgaccaataaagttacgaatgatctgcatttcgctgcgttcagcgccgatcacgcggccttcggtggtcaccaataacaaacgctgtcctggcggtgcccacttatcaatcgcccggaacagacgccgccaccacattaaatcgttgggcggatcgttcgccagctccgcttcgacatgctgctcaatcatcagcccctgacgctgttcgctatccagaagctcggtcatctggcgtgaatcgagcttgggtaacatcaaaaccaacatcaacaccagcgccagcgtcagccagaagatggcgaagatgcgcgcggttaagctgcctatcatgaagcagaaaccatcagatagccgcgaccacgcaaggttttaaaccacgggtgaccatctttacgatccggcagtttacgacgcaggttggaaatgtgcatatcaatagcgcggtcgaaaggcgtcaggcgtttgcccaacacttcctggcttaaatgttcacgggaaaccacctgacccagatgctgtgccagcaaatagagcagggtaaactcagtaccggttaactccagcgtttgcccgtcgaagctggcttcctgacggcctggattcagcactaaggcatcaacttccagtgtcggtgaaccgttgtcgttgttttgctgttgctcgctccagtgcgaacggcgcaggatcgcgcgaatacgtgccaccagctcacgatcattaaacggtttcgggagatagtcatctgcgcccagctcaaggccgagaacgcgatcaagttcactgccgcgcgccgtcaacataatgacaggcgtctggtgtgtctggcgaagtgcttttaatgtgtcgataccatttttcttcggcatcattacgtcaagcaaaagtaaatcaatgctgtcgtccagaagatcaagcgcctgttccccatcgtgggcaacaatcacgttgaagccttccatctcgagcagctcctttaatagggaagtcagctctcggtcatcatcaactaacaggattttattcattgtttaaatacctccgaggcagaaattacgtcatcagacgtcgctaatccatgactttacgttgttttacaccccctgacgcatgtttgcagcctgaatcgtaaactctctatcgttgaatcgcgacagaaagattttgggagcaaatgatgcgcatagttaccgctgccgtcatggcctcaacgctggcagtcagttcattaagccacgctgctgaagtcggttcaggcgataactggcatccgggtgaagaacttacgcagcgcagtacgcagagccatatgttcgacggcataagtttaaccgaacatcagcgtcagcagatgcgagatcttatgcaacaggcccggcacgaacagcctcctgttaatgttagcgaactggagacaatgcatcgccttgtcaccgcagaaaattttgatgaaaacgctgtgcgcgcacaggcagaaaaaatggcgaatgagcaaattgctcgtcaggttgagatggcaaaagtccgcaaccaaatgtatcgcctgttaacgccggagcagcaagcggttttaaacgagaaacatcaacaacgaatggagcagttgcgtgacgtgacgcaatggcaaaaaagttcatcgttgaagctattgagtagtagcaactcacgttcccagtagtaaaccctgttttccttgccatagacaccatccctgtcttcccccacatgatgtggggttttttttatcaaatacttacatgcaatcaaaagtaaaaacagttacttatcgaaagctgtaagggtttggagcggtttcaaaatttcttgagtgtggacactatgtggacactcagagggggaaatttataacgtcactccgccttttagtggattcagagcgacggcattttgcagatagtcaggcgcaaggtgcgcataggccatcgtctgctgaatgctcgcatgtcccagaatctgttgcagtgcgattatattgcccccattcatcatgaaatggcttgcgaatgtatgccgcaggatgtgggttgcctgattgggtggtatatcaggtttcactctgcgtaaaatcccgcaaaatttctcataatcaactttgaataatttggcgctggcctcctctttaacttttttctccagttcctcagaaatcggcacggttcgctttttaccgtttttggttttcaggaaggtaaccctgcaatttgtaatctgtgctggttttagcgtggcaacttccgtccatcttcctccagtgctcagacataaaagcgcgacaagtaagtcatcaccagccaaaacatttaacagtttttcgatttctgctttttccaggaacgtcatttcagggttggcctccgccagtggcggcagtccgtgaattgggtgttgcccggaaaattcatccaattgaattaattttgtgaacatgccggataatctgtacatgtcacggtttatcgttgcggcactgataccatcacgtagtcgcatggaacgataatccatcaaagcccttttgctcatcctgctcactggtatatcacctatgccgctgatggttttgagtagatgattaaactcttttgttccatgctcgtggttttgcccgtgatatttccaccagatgtccagcaactcactcaaagtccggcggtctgctcgctggcctccccattctttctgactggcattggcgattgtgtatcgctcaaatgctagtgcttcagcttttctttcgaatttcctgcggatgcgttttccgtcgcgaccgcgaggtctaatgtccacttcatagcgaccatcatcgagcttcttaattgccataagaaagccctccggcgctgtattcaccatcttggtagcaaatggtgaaaatgtaatctttatatagagttagccaatccttttcgcggagtggttggactctgttgactctggcccaatgtgcgcgagagccggtgcgatttgtcctgcgtccggcgcggttttatctgtcataagccatagagcatatttttggaatgtgggatgcatagtgatttttagcaaagctgtgccaccgggttcaaagtttcctccttcatattttttaagtgtgcttagcggtaactctatgatttcacagaattttgattggcttagcccttcagcctcacgcaaggccttaatcttttcgcttaatttcatttgacatggtgcctatatagggactaaattccctcaaaactggaacctatataggttccattgatttgagaataaaccagcgtctaaacggttttgagtggtttagaaagggctggatcctatgagggtaccatatatggacgctgaaaattatgtgattcagtatccgcttgatgcggttcatgtggataaatttgctgatttattagggaagccaaagacagccgtcagtgaaatggtgaaggcaaataaattaccaattattgaattgcgtgatccttgcaaaccgaaggctcgtgccggtgaaaaatgggttttcattcctgagtttaatcgcgctgtacgtgaggcgttttataaccgaccggttgaacagcgtgatgcatggcttttgtggatggggttgtgattatgaatgagccgcgttgtattgctcagttattgcgtaacgaaagccctagggcgattgacttcaccatcacccacgggaagggtcgcaagggaatcattatccgcaccaaaaaacagagtccgttaaaaaaggctctgacctttctgaaaagccggagggtctggaaatgacagtgatgacgctcaatctcgtcgaaaaacagccagcagctatgcgccggataattggtaagcatcttgccgtccctcgttggcaggatacatgtgattattataatcagatgatggagcgcgaacggctaacagtttgctttcatgcgcagttaaaacaacgtcacgcaacgatgcgttttgaagaaatgaacgacgtcgaacgtgaacggctggtttgtgcaattgatgaattgcgtggggcattctcaaaacgccgtcaggttggcgcaagtgagtatgcatatattagttttttaacagtcagtcagcgtcgtactttatttatgcatgccggattgactgaaaaagaattcaatcagccatactggcgaattaatgaagagtcatgttactggcgtgatgctttattccgtgcattacgtgaactattcagtctgtttgagtatgcaccgacaattctgacgtcggtaaaaccagagcaatatttgcattaaataattaaccagagtttttaacgcacttaattgtgcggggcttctttttgcctggagaaagtcatgcatacagtttctgaaaatcagtgcggtaaatacgcattactgctgcaacaggccagaaccgaagcacaggccgacgctgcgacgcgcttttcttctcatcttgacgccatgattcgccatatcacaaaggcggagttatcccgcgtggagatagtcgagctgctcagtcaggagtcggaaaaatttcacaatatcggattgtctcgcggggaggtgctttgatgtcctgttctcattcagttgtattactgaataacgccttaaaaatcgccgttatgaaaaatggcgacttgtctcttattcaactttgtcttgataaagaaaaacgcgacatcactgaatctgttatcgcgatttatcagaatgaattaaacctcctgtctgatgtggtcaatttacttgttaaacgcgctgtattccacaagcaaatttcctcagtggatgaactgacaaaattaacgacagaacttgccagttattgcgctgatgtatccaggaaacttaacgataaaaggagctgataatgccggacaacatagattttattcaggaacaacaggctgaattactggagcgccagattaacgcggcaagggtaaaacattgcggtgcttctgcgctggtttgcgaagagtgtgacgcgccaattcctgctgcccgtcgtgcggcttatccgtcagccacgcgttgtgtttcctgtcagtcagtctttgaagcaaaaaacaaacattaccggagaacggcatgagtattcgtattgaaattggcgaacgttatgtcgttaccagtgacagcttccagtttattctccacgagaaaaagagagcggaaagcggtaaaaacgccggtcaggaatggctggcggtggttggttattacccgaaattaagccagctcgtttccggcctgatgcatcacgatattctgaccggaagcgcaaagtcttttgctgatttaaacgcgcaggttgagcaactcagcaagcgttgttcagaggcttttggctcatatggccgttaaagcctccgggcgttttgtccctccgtcagcatttgctgcaggcaccggtaaggcgtttaccggtgcttatgcatggaacgcgccacgcgaggctgtcgggcgcgaaagaccccttacacgtgacgagatgcgtcaggtgcaaggtgttttatccacgattaaccgcctgccttactttttgcgctcgctgtttacgtcacgctatgactacatccggcgcaataaaagcccggtgcacgggttttatttcctcacatccacttttcagcgtcgtttatggccgcgcattgagcgtgtgaatcagcgccatgaaatgaacaccgacgcgtcgatgctgtttctggctgagcgtgaccactatgcgcgcctgccgggaatgaatgacaaggagctgaaaaagtttgccgcccgtatctcatcgcagcttttcatgatgtatgaggaactcagcgatgcctgggtggatgcgcatggcgaaaaagaatcgctgtttacggatgaggcgcaggctcacctctatggtcatgttgctggcgctgcacgtgctttcaatatttcccctctctactggaaaaaataccgtaaaggacagatgaccacgaggcaggcatattctgccattgcccgtctgtttaacgatgagtggtggattagtcagcttaaaggccagcgtatgcgctggcatgaggcgttactgattgctgtcggggaggtcaataaagaccgttctccttatgccagtaaacatgccattcgtgatgtgcgtgcacgccgccaggcaaatctggaatttcttaaatcgtgtgatctcgaaaacagggaaacaggcgagcgcatcgaccttatcagtaaggtgatgggcagtatttctaatcctgaaattcgccggatggagctgatgaacaccattgccggtattgagcgttacgccgccgcagaaggtgatgtggggatgtttatcacgctgaccgcgccgtcaaagtatcacccgacacgtcaggttggaaaaggcgaaagtaaaaccgtccagctaaatcacggctggaacgatgaggcatttaatccaaaggatgcgcagcgttatctctgccgtatctggagcctgatgcgcacggcattcaaggataatgatttacaggtctacggtttgcgagtcgtcgagccacaccacgacggaacgccgcactggcatatgatgcttttttgtaatccacgccagcgtaaccagattatcgaaatcatgcgtcgctacgcgctcaaagaggatggcgacgaaagaggagctgcgcgaaaccgttttcaggcaaaacatcttaatcggggcggtgctgcggggtatatcgcgaaatacatctcaaaaaatatcgacggctatgcactggatgggcagctcgataacgatagcggcagaccgctgaaagatactgccgcggctgttaccgcatgggcgtcaacgtggcgcattccgcaatttaaaacggttggcctgccgacaatgggggcttaccgtgaactacgcaaattgcctcgcggcgtcagcattgctgatgagtttgacgagcgcgtcgaggctgcacgcgccgccgcagacagtggtgattttgcgctgtatatcagcgcgcagggtggggcaaatgtcccgcgcgattgtcagactgtcagggtcgcccgtagtccgtcggatgaagttaacgagtacgaggaagaagtcgagagagtggtcggcatttacgcgccgcatctcggcgcgcgtcatattcatatcaccagaacgacggactggcgcattgttccgaaagtgccggtcgttgagcctttgactttaaaaagcggcatcgccgcgcctcggagtcctgtcaataactgtggaaagctcactggtggtgatacttcgttaccggctcccacaccttctgagcacgccgcagcagtgcttaatctggtagatgacggtgttatcgaatggaatgacccggaggttgtgagggcgctcagaggtgcattaaaacacggactgagaagaccaaaccgtcagcaaagaaacggaagcccgttaaaaccgcatgaaatagcgccatcggccagactgacccggtcggaacgaatgcaaattacccgtatccgcgttgaccttgctcagaacggtatcaggccgcagcgatgggagcttgaggtgctggcgcgtggggcaaccgtaaattatgacgggaaaaaattcacttacccgctcgctgatgagtggtcgggattctcaacagtattagagtcaaactcagtgaagcgttaactcaataaatatgagtttataagttaggcctcgagattttgtagaaagggatgtatactgagtatcgtatagatttggagtgagtgatgactgtaaaggtgatagaccttttttgtggtgctggcggattaactcatggtttgcagcttgcggggcttgatgtcgttgcaggcattgaccttgagggggaatgtaggtttccctatgaaagaaacaataaatctaagtttattgagcaagatatcgctaaagtaacaaaagaggaactgctgaggctttatggtgatgcgtctgtaaaagtattggcaggatgcgcaccttgccaacctttttcaaaatatactcaaggaaaagataaggctgatgataaaaaatggcctcttctttatgagttcgaacgtttaattcgcgaagtatctccagaaatcgtaacaatggagaacgttcctgatgtaactaaacataaagtttataatgatttttataattcattgttaaagttgggctattatgtttgggcgtctaagattgattgtgtcgaatatggaatcccacaaaaccgttcccgtcatgtattgttggcctcaaaattgggggcgattgagttagtaaaacgtgacgatgttattttgaaaacagttagagatgcaataggaaatcttcctccattagaagatggccaaacagatccaaatgatatattacatagagccagtaaattaaatccgattaataaaaaaagaattatacactctgttcctggtggtacatggaaggactggccgaaagagttggttgccgcttgtcatatgaaatccagcggtaaagggtatgctagtgtatatgggcgcatgtcttgggataagccaagtccaacaattacaactctttgttatggtttcgggaatgggcgttttggacatccagaacagcatagagcgatttctcttagagaggctgctttattgcaaactttcccgatggattatatttttgtagaagacaaaaacaagtttgttataagaagtattgggaaaatgataggtaatgctgttcctgtggaactaggaaaagcaattgggcaatcaatcaagaaccatttagaatgataaaatggcctgctttacaggccttataactattgttctaaatattcattattatttatatagtgctctatattattcacgatagcatcaagataggcgattacttctaatgaaatattctctaagtcctgatatgaaacattttttccaatctcagcaaatgatacattgccatgagataaatcattacgatgttgtttaacagtggctaatttttcaccatgtttagtgtgagtgtaatcggaatgtgtagaaaaaccatatattttcgatttttctttgatttcctctctatcaatatttcctgagaatattttctttttgttgaacgtgccataagatataccgcaagatatacctttggtaaggtgattaactaaactttcaacatttacagattcattttttaatctttttaatatttctgacctgagatttttcctgagtttgtcaaattctacgtttctatcataaatagtctcatgaataaggcagatagcttctctcattgttgattcaatgaggttatataacagtatatatactgctccctttagagtttttcgtgattgagcagtaatggagaacttatgttctttatcatcagctgatatcagttctgcaccggcatactcaataaatttcaaaagatccaaataggccaagatctctcctgacctttcgtcaaaatcctcacgaaaacgatccatgttaatcctctaataatttatcccgaacatattcaattcgttcaattaccttcacgcgactattagctccgtcggaagtggtcaatcgtttgaattcttctgagcttagccaatctaagttcttgggaacaaggtcagggacttcacgtaatgcaagtgctgcgccaacagcgagagattcgaatctaactcgaggtgtagattttgcagtaatagttttcttgaatcctgctgggaaatagttttcaacaaaagatagaacattagcaaactcttgtttcattgagttttgtttagtttcgtctatatctcgattttctgacatatagtcatttagaaaatcccgtacggaatgatcaaagttcttgtacttatctacgtaggcaaagaatcttaatgtaaattctaaccgttcatctcgtttttctttagtctgagataaaggtgctaattctttaaatttaggtattgttgagcatggcttaataacctgtgtatataaatttgttgaaccaagttctgatcctttacggacttccatatctttcaatatatcgctgccagagttaatacgctcaaaaagatctctacgggtttcttcattgcatttagaactcaattctataacgcggacaggaattctcatgaaacgacgttgacgtgataatggtaaatcttggaatttgaaaccattaaggacgtctaaagatttcaggtcttgtaaaactaattcattttggataaaagcgtgtatagtcctaactcgttgtgagccatcaacaatctcaattcgcccatctaaatcgggatcttcggagagaacatctgctataaatatatatggtataggaaaacccaaaatcaaagactctatcaattttgattgtcttttttcactccaaacaaaatccctttgataatcaggaacaaagagttcgttagtatcatcctctaatccgttatgatacttattaactaataactcaacggtaaattctttggtctcaaaatccacatccttttgctcagcacgaatttgctcttcagcgttttgctttatcacctctagctgagcaagcaactctgctcttttcttggcattatcttcattttctagttgagattttaaatcaataatgtccatgtctagttcccttaacaagtgttaaaaattgaagcggatagcataccgcatagatcatgaaaaatgccatcatgtgcatggatttgcatgcgtcagaagtcgcttttattgttagttatcactagcgctggcgtgctcttggagtgttcatgcaactgcattaaaaccgccccatgaagcgggcgggcgaggcggggaaagcactgcgcgctggcggtggtgctgattttattttccagcgtctcagcgcgtcgtgacggcgcttagtctgcccgttgggcgttggtgtgtctgcgggattttttgtgcggtgatgagcgtgtgagggcgtgatggcggggtgtaaaaaagccgcccgcaggcggcgatgttcagccgttgtcagtgtccagtgagtagtttttaaagcggatgacctcctgaccgagccagccgtttatctcgcggatcctgtcctgtaacgggataagctcattgcggacaaagacctttgccactttctcaatatcacccagcgacccgacgttctccggcttgccccccatcaactgaaaggggatgcggtgcgcgtccagcaggtcagcggcgctggcttttttgatattaaaaaaatcgtccttcgttgccacttcactgagcgggataattttaatgccgtcggctttcccctgtggggcatagagaaacagatttttaaagttattgcggcctttcgacttaaccatgttttcgcgaagcatttcgatatcgttgcgatcctgcacggcatcggtgacgtacatgatgtatccggcatgtgcgccgttttcgtaatacttgcggcggaacagcgtggccgactcattcagccatgcagagttaagggcgctgagatattccggcaggccgtacagctcctgattaatatcaggctccagcaggtgaaacacggagccgggcgcgaaggctgtcggctcgttgaaggacggcacccaccagtaaacatcctcctccacgccacgacgggtatatttggccggtgaggtttccagtctgatgaccttaccggtggtgctgtaacgcttttccagaaacgcattaccgaacaccagaaaatccagcacaaaacggctgaaatcctgctgggaaagccacgggtgcgggataaacgttgaagccagaatattacgtttgacgtaaatcggtgagctgtgatgcacggcagcacgcaggctttttgccagaccggtaaagctgaccggcggctcataccatctgccgttactgatgcactcgacgtaatccagaatgtcacggcggtcgagtaccggcaccggctcaccaaaggtgaatgcttccattttcggggcgctggcggtgattgtttttgccgcaggtcgcggtgttttcccttttttcttgctcatcagtaaaactccagaatggtggatgtcagcggagtgctgataccggcggtgagtggctcatttaacagggcgtgcatggttgcccaggcgaggtcggcgtggctggcttcctcgctgcggctggcctcataggtggcactgcgtccgctgctggtcatggtcttgcggatagccatgaacgagctggtgatgtcggtggcgctgacgtcatattccagacagccacggcggatgacgtctttggccttgagcaccattgcggttttcatttccggcgtgtagcggatatcgcgcgcggcgggatagaacgagcgcacgagctggaacacgccgacaccgaggccggtggcatcaataccgatgtattcgacgttgtatttttcggtgagtttgcggatggactccgcctgggtggcaaagtccatgcctttccactggtgacgctcaagtattctgaatttgccaccggccaccaccggcggtgccagcaccacgcatccggcgctgtcgccacggtgtgacgggtcgtaaccaatccataccgggcgggagccgaacggatttgcggcaaacggcgcgtagtcttcccattcttccagcgtgtcgaccatgcagcgttgcagctcctcgaacgggaacaccgataccttgtcgtcaacaaattcacacatgaacaggtttttaaaatcgtcggcgctgttttcgcgtttgagctgctcaatgtcgaacaatgtgcagccgcctttcagggcgtcctcaatggtgacaatctgccgccactggccgtccgcacagagaagaccaccggcaagggcgttatgactgacgtcgatttccacacgttcggcggcgctggcgcgtccccggttgaacagttcacccgaccagaacgggtaggcgtcgtgcgccagcgtggacggggtggagaaataggtcgagcgcaggtgactctgtgaggccatacctgatgccaccttacgcagtacctgaaaattcgggatccagaaaatctcgtcgacgtacaggtcgccgttatggctctgtgcggtgttggagttggtgccgagaaaaatcagttttgcgccgttattgcccaggacaatcgggtcaccggtcaggtcaacgtcaaccagacgagcaaaggcgatgatgtattcacggaacacatacgcctgcgttttactggccgacagaaaaatctggttatggccggttttcagggcgcgcagcagcgcctcgcgggaaaaataaaacgtcgcgccaatctggcgggatttcaggatatcgcggatgcggtgctcaagcccggcacgataccagtgcaactgatagtcgaaagactgctcaaagaaaatctgctccagcttttcgatggcctcgtcactgaaaaaattctttttcggtttgcgacgcccgcctttgttgcggttagcgatgttcggattaaggtctgcctcgttgccggtctggctgtagcggtttacccgtgccagtcgttcaatctggcgtccgagcaggtcaatttccttgaagtcaccgccggttttctgcggtttgatgatgagctgggtcagccgcgcttccagactcatttcgacacggctgatgggggcaacactgtcccagccgtcgcgctgtttccagctctgcaccgtcgggcgtttcatctgcaacatggcggcaatctgcggcacggaaaacccctgccagtacagcagcgccgcctgacgacgcgggtcgtgtaaaagagtggtgtctgtggtgatggtcatgaatacctcgccgtgatgaatacacggcaaggctactgagtcgcgccccgcgattcgctaatgtgctgttgtgtcagtgataaaccatccgggactgatggcggaggatgcgcatcgtcgggaaactgatgccgacatgtgactcctctaatcactattcaggactcctgacaatggcaaaaaaagtctcaaaattctttcgtatcggcgttgagggtgacacctgtgacgggcgtgtcatcagtgcgcaggatattcaggaaatggccgaaacctttgacccgcgtgtctatggttgccgcattaacctggaacatctgcgcggcatcctgcctgacggtatttttaagcgttatggcgatgtggccgaactgaaggccgaaaagattgacgatgattcggcgctgaaaggcaaatgggcgctgtttgcgaaaatcaccccgaccgatgaccttatcgcgatgaacaaggccgcgcagaaggtctacacctcaatggaaattcagccgaactttgccaacaccggcaaatgttatctggtgggtctggccgtcaccgatgacccggcaagcctcggcacggaatacctggaattctgccgcacggcaaaacacaaccccctgaaccgcttcaaattaagccctgaaaacctgatttcagtggcaacgcctgttgagctggaatttgaagacctgcctgaaaccgtgttcaccgccctgaccgaaaaggtgaaatccatttttggccgcaaacaggccagcgatgatgcccgtctgaatgacgtgcatgaagcggtgaccgctgttgctgaacatgtgcaggaaaaactgagcgccactgagcagcgcctcgctgagatggaaaccgccttttctgcacttaagcaggaggtgactgacagggcggatgaaaccagccaggcattcacccgcctgaaaaacagtctcgaccacaccgaaagtctgacccagcagcgccgcagcaaggccaccggtggtggcggtgacgccctgatgacgaactgctgaccggcgtcagtcagtccgggaaaaccttcacgattaacccttaatttcaggaaaaactatgcgccaggaaacccgctttaaatttaatgcttacctgtcccgtgttgccgagctgaacggcatcgacgccggtgatgtgtcgaaaaaattcaccgttgaaccgtcggtcacccagaccctgatgaacaccatgcaggagtcctctgactttctgacccgcatcaacattgtgccggtcagtgaaatgaaaggggaaaaaattggcatcggtgtcaccggctccatcgccagcaccaccgacaccgccggtggcaccgagcgtcagccgaaggacttctcgaagctggcgtcaaacaagtacgaatgcgaccaggttaacttcgatttttatatccgctacaaaacgcttgacctgtgggcgcgttatcaggatttccagctccgtatccgtaacgccattatcaaacgccagtcccttgatttcatcatggccggttttaacggcgtgaagcgtgccgaaacctctgaccgcaacagtaatccgatgctgcaggatgtggcggtcggctggctgcagaaataccgaatgaagccccggcgcgcgtgatgagcaaggtcactgacgaggaaggccgcaccacctctgaggttatccgcgtgggtaagggcggtgattatgtaagcctcgatgcactggtgatggatgcgaccaacaacctgattgaaccttggtatcaggaagaccctgaccttgtggtgattgtggggcgtcagctactggcggacaagtatttccctatcgtcaacaaggagcaggataacagcgagatgctggccgctgacgtcatcatcagccagaaacgcatcggtaacctgccggcggtacgcgtcccgtacttcccggcggatgcgatgctcatcacgaagctggaaaacctgtccatctactacatggatgacagccatcgccgcgtgattgtggaaaacccgaaactcgaccgcgtggagaactacgagtcaatgaacattgattacgtggtggaggactacgccgccggttgtctggtggaaaaaattaaggtcggtgatttctccacaccggctaaagcgaccgcagagccgggagcgtaaccgatgacgagtcccgcacagcgccacatgatgcgggtctcggcagcgatgaccgcgcagcgggaagccgccccgctgcgacatgcaactgtctatgagcagatgctggtcaagctggccgcagaccagcgcacactgaaagcgatttattcaaaagagctgaaggccgcgaaaaaacgcgaactgctgccgttctggttgccgtgggtgaacggcgtgctggagcagggcaaaggtgcacaggatgacattctgatgacggtcatgctgtggcgtctggataccggcgatattgccggtgcgctggagattgcccgttatgccctgaagtacggtctgaccatgccgggtaaacaccgccgcaccccgccgtacatgttcaccgaggaggtggcgcttgcggccatgcgcgctcacgctgccggtgagtctgtggatccccgcctgctgacggacaccctcgaactgaccgccacggctgacatgcctgatgaagtgcgcgcaaagctgcacaaaatcaccggtctgtttctgcgtgacgctggtgatgccgcaggtgcgctggtacacctgcaacgtgcgacacagctcgactgtcaggcaggcgtcaaaaaagagattgaacgactggagcgggagctgaaaccgaagccggagccgcagcccaaagcggccacccgcactccgcgtaagacccggagcgtgacaccggcaaaacgtggacgcccgaaaaagaaagccagttaacaaccgaatgcgccccgcgccagggcggcacgccggtcagtgacggtgaatcacctgacactgcaccggcgtccaccgcccgacttttcagaggtagtcatgatgacgctgattattccgcgaaaggaggctcccgtgtccggtgagggtacggtggttatcccgcaaccggcaggcgacgagccggtgattaaaaacacgttcttttttcccgatattgacccgaagcgcgtccgggaacgtatgcgccttgagcagaccgtcgcccccgcccgtctgcgtgaggccatcaagtcaggcatggcggagacgaatgcggagctgtacgagtaccgcgaacagaaaattgctgccggtttttcgcgtctggctgacgtcccggcggacgacatcgacggtgaaagcatcaaagttttttactacgagcgcgctgtgtgtgcgatggcgaccgcgtcgctttatgagcgttaccgcggcgtggatgccagtgccaagggcgacaagaaggccgacagcattgacagcaccattgatgagctgtggcgggatatgcgctgggcggtggcgcgtatccaggacaagccgcgctgcatcgtgagtcaaatctgatgaagacctttgcgctacagggcgacacgctcgacgccatttgtgttcggtattacgggcgcactgagggcgtggtcgaggccgtgctcgccgcaaatccgggactggctgaactgggggcggtgctgccacacggcaccgccgtcgaactgcccgacgttcagaccgcgcccgtggctgaaactgtcaatctgtgggagtaacgcatgacagcagaagaaaaaagcgtcctgtcgcttttcatgattggggtgctgattgttgtcggcaaggtgcttgccggtggtgaacccatcactccgcgtctgtttatcgggcgcatgttgctcggtggttttgtctcgatggttgccggtgttgttctggtgcagtttcctgacctgtcactgcctgcggtgtgcggcatcggctccatgctgggtatcgccggttatcaggtgattgagattgccattcagcgccgctttaagggcagggggaaaccgtaatgccggtaattagcacacatcagaatatcgccgcctttctcgacatgctggccgtgtccgaagggacggcgaatcatccgctgacgaaaaaccggggctatgacgtgatagtcaccggactggacgggaagccggaaatcttcaccgactacagtgaccacccgttcgcacatggccgaccggcgaaggtgtttaaccgtcgcggtgaaaaatccacggcctccggtcgctatcagcagctttacctgttctggccgcactaccgcaaacagcttgccctgccggatttcagtccgttgtcacaggacaggctcgccattcagttgatccgcgaacgcggtgcactggatgacatccgggcgggacgcattgagcgcgccatttcacgctgtcgcaatatctgggcgtccctgccgggtgccggttacggtcagcgtgagcattcactggaaaaactggtcaccgtctggcgcaccgctggcggcgtaccggcttaaacggagtaaacaccatgaagaaattatccctttcactgatgctgaacgtgtcgctggcgctgatgctggcactgtccctgatttacccgcagagcgtggccgtcagttttgtcgctgcatgggcgattctggcgacggttatctgtgtgattgccggtggtgtcggcgtgtatgccgcggagtatgtgctggaacgctacgggcgggagctgccgccggaatcgctggccgtgaagattgtcacgtcgctgtttttgcagccggtgccgtggcgcagacgggcagcggctctgatggtgatggtggcgacgtttatctcgctggtcgctgccgggtggatttttaccgcactgatttatctcgtggcatcgctgtttttccggctgatacgtacggcctgccgtcagcgtcttgaggggcgggaaccatgtcaaaactgatgattgtgctggttgtgttgttatcgctggcggtggccggtctgtttctggtgaaacacaaaaatgccagcctgcgcgccttgctggacagggcgaacaacgtcgccagtgaacagcagacgaccatcaccatgctgaaaaaccagcttcatgttgccctcaccagggcagacaaaaacgagctggcgcaggtggcactgcgtcaggaactggagaacgccgcgaagcgtgaagctcagcgcgagaaaaccatcacgaggttacttaatgaaaacgaagattttcgccgctggtacggtgctgacctgcctgatgctgtgcgccggttgcaccagcgcacagcctgcgcagacgccagtgattgtccacaacgcctgcccgaaagtgagcctttgcccgatgccgggcagtgacccgcagacgaacggcgatttaagtgctgatatccggcagcttgagaacgcgctggcacgctgtgccagccaggtaaaaatgattaaacactgtcaggacgaaaacgatgctcaaacccgacagcctgcgcagggcgctgactgatgccgtcacggtgctgaaaacaagccccgagatgctgcggatattcgtggataacgggagtattgcctccacactggcgacgtcgctgtcattcgaaaagcgttacacgctcaacgtgattgtgaccgactttaccggtgattttgacctgctcatcgtgccggtgctggcgtggctgcgggaaaatcagcccgacatcatgaccaccgacgaaggccagaaaaagggcttcacgttttatgcagacatcaacaatgacagcagctttgatatcagcatcagcctgatgctgaccgagcgcacgctggtcagtgaggtggacggcgcgctgcatgtgaagaatatcccggaacctccgccgccggagccggtcacccgcccgatggagctttatatcaatggcgaactggtgagtaagtgggatgaatgagtttaagcgttttgaagacaggctgaccggacttattgagtcgctgtcaccgtcagggcgtcggcgactgagcgccgaactggcgaaacgtctgcgtcagagtcagcagcgtcgggtgatggcacagaaagccccggacggcacaccctacgcaccacgccagcagcagagcgccagaaaaaagaccggtcgcgttaagcgaaaaatgtttgcgaaacttatcaccagtcgttttttgcatatccgcgccagccctgaacaggcatcaatggagttttacggcgggaagtcaccgaaaatagccagtgtgcatcagttcggtctgtcggaagaaacccggaaagacggtaagaaaattcattatccggcgcgtcccctgctcggctttaccggtgaggatgtgcagatgattgaagagattatcctggctcacctcgaccgttagttgtgccattcctgacacctcatcgtcacattgccgccggtatgacccggcggcatccttcccgttatgaacactctcgcaaatattcaggaactcgcgcgcgcactgcgcaacatgatccgcaccggcattatcgtcgaaaccgaccttaatgccggtcgctgccgtgtgcagaccggcggcatgtgcaccgactggcttcagtggctgacccatcgcgccggacgttcgcgcacatggtgggcaccttccgtgggggaacaggtgctgattctggccgtaggcggtgaactcgacacggcgttcgttctgccggggatttattccggtgataaccccgcgccgtctgcgtcggcggatgccctgcatatccgtttccctgacggggcggtgattgagtatgaacctgaaaccagtgcactcacggtaagcggaattaaaacggccagcgtgacggcttctgattctgttactgccacggtgccggtggtcacggtgaaagcatcaacccgcgtcactctggacacgccggaggtggtctgcacaaacaagctgatcactggcacgctggaagtgcagaagggcgggacgatgcgcggcaacattgaacacaccggcggtgaactctcatcaaacgggaaggtactgcatacccataaacaccccggcgacagcggcggcacaaccgggagtcctctatgacagcgcgttatctcggaatgaatcgcagtgatggcctgactgtctctgaccttgagcatatcagccagagtatcggcgatatcctgcgcacgccggtcggctcacgggtgatgcgtcgtgattacggctcgttgctggcgtcaatgattgaccagccgcagaccccggcgcttgagttgcagattaaggtcgcctgttacatggccgtgctgaaatgggaagcccgcgtcaccctgtcatccgtcaccacggcgcgcagctttgacgggcgaatgacggtcacgttaaccggccagcacaacgacaccggccagccactttcgttaaccatccctgtgagttgaaaccatgccgattatcgacctgaaccagctacccgcaccggatgtggtcgaggagctggactttgaaaccattcttgccgaacgcaaggcgacactgatttccctttacccggaagaccagcaggaggcggtcgcccgtaccctgacgctggaatccgagcctctcgtcaaactgctggaggaaaatgcttatcgtgagcttatctggcgtcagcgtgtgaatgaggccgcacgggcggtaatgctggcctgtgccgccggtaatgaccttgatgtgattggtgccaattacaacaccacgcgcctgattatcaccccggcagatgattcgaccctcccgccgacaccggcagtgatggaatctgacacggattatcgtctgcgtattcagcaggcgtttgaaggtttaagcgtcgccgggtcggtgggggcctatcagtatcatggtcgcagtgccgacgggcgtgtcgcggatatttctgtaaccagtccgtctccggcctgcgtcaccatctctgtgctgtcacgtgaaaataacggtgtcgcatccgaagacctgctggcggtggtgcgtaacgcccttaatggtgaggacgtcaggccggtggccgaccgcgtgaccgtgcagtctgccgccatcgttgaataccagataaacgccacgctttacctttaccctggtcccgaaagcgaacccatacgcgctgctgccgtgaaaaaactggaagcgtacatcacggcacagcaccggctggggcgcgacatccgtctgtctgccatttatgccgctttgcatgtggaaggcgtgcagcgtgtcgaactgactgcaccgctggccgacatcgtgctcaacagtacgcaggcgtctttctgtaccgaataccgcgtcgtgaccggaggctcggatgagtgattcgcgactgctgccgaccggctcatcaccgcttgaagttgccgccgcaaaagcctgtgcggaaattgaaaaaacgccggtcaggattcgtgaactgtggaacccggatacctgtccggcaaatctgctgccgtggctggcgtgggcgttttcggtcgacaggtgggatgaaaagtggccggaagcgacaaaacgcgccgttatccgcgatgcctatttcatccactgtcataaaggcactatcggcgcaatccggcgtgtggtggagccgctcggctatctcatcaacgtgacggagtggtgggaaaacagtgacccgcccggcaccttccggcttgatattggtgtactggaaagcggcatcacagaggcaatgtatcaggaaatggaacggcttattgctgatgccaaacctgcaagccgtcatcttattggcctgaacattacccgggacattcccggctacctgttcgccggtggtgtggcttacgacggcgatgtaattacggtttaccccggataagtgaggaataatgagcacaaaattcagaaccgttatcaccactgccggtgcagcaaagctggcagcggcaaccgcaccgggagggcggaaggtcaacattaccacgatggccgtcggggatggcggtggtaaattgcctgtcccggatgccggacagaccgggcttatccacgaagtctggcgacatacgctgaacaaaatcagccaggacaaacgaaacagtaattatattatcgcagagctggttattccgccggaggtgggcggtttctggatgcgtgagcttggcctgtacgatgatgcgggaacgttaattgccgtggcgaacatggccgaaagttataagccagctcttgccgaaggctcagggcgttcgcagacctgtcgcatggtcatcatcgtcagcagtgtggcctcggtggagctgaccattgacaccacaacggtgatggcgacacaggattacgttgatgacaaaattgcagagcacgaacagtcacgacgtcacccggacgcctcgctgaccgcaaaaggttttactcagttaagcagtgcgaccaacagcacgtctgaaacactggccgcaacgccgaaagcggtaaaggccgcctatgaccttgctaacgggaaatataccgcacaggacgctaccacagctcgaaaaggtcttgtccagctcagtagtgccaccaacagcacgtctgaaacgcttgcggcaacgccaaaggcggttaagacagcgtatgaccttgctaacgggaaatacactgcacaggacgccactacagcgcgaaaaggtcttgtccagctcagtagcgccaccaacagcgattctgaaacgcttgcggcaacaccaaaggcggttaagacagcgtatgaccttgctaacgggaaatacactgcacaggatgccaccacagcgcgaaaaggtcttgtccagctaagtagtgccatcaacagcgattctgaaacgctggccgcaacgccaaaagcagtgaagtctgcctatgacaatgctgaaaaacgtcttcagaaagatcagaacggtgcggatattccgggaaaggataccttcacgaaaaatatcggtgcctgtcgtgcttatagcggcgctttgagcactgaagccggaaactggacaaccgctcagtttattgaatggctggattcccgtggtgcatttaatcatccgtactggatgtgcaaaggctcctggtcatatgcaaataacaaaatcattacggataccggatgtggtgatatccacctggctggttgtgtcgtcgaggtcatgggaactaaatctgcaatcactatccgagtgaccacgccaacaacatcaagcggtggcggtacaaccagcgcgcaattcacttacataaatcatggggacggctactcccccggctggcgtcgtgactggaatcgtcagggcgactcaatgaccggaacgattaatcaggatggcggaagccagaatgcctatatgtctacggccttatgttcaggcaccagaggcggcaaaaaatatctcagaaagtttcgtggtggagaaggagatactatctggcatgaaacagttcagggcggggtaattcgctgggcgacaggaaacaatgacgctcaggaagaattatcactcagctccgcttatggtctccgttcaagaggtgaaattacatcactcagtgctaatggtctgcgcattgcttatggcaattatggattctttatcaggaatgatggcggcagcacatatttaatgctgacggcctctggcgataaatttgggacatggaacggcttaagaccgctgactatcaataacgccaatggcggagtgtcaatggggcatggcctgagtgttacaggtgatattgtctcaagtaccaaagtacgtgccggtagcgggaaaaagttcacggtcagcagcagcaatacatccacgaaggaagccgcattcaatttgtggggaaactcaagtcgtcctgtggtggctgaattaggtgatgatgcaggctggcatttttacagtcagagaaatacagataacagcatcacttttgctgttaacgggcaggtatcaccatctaactatggcaactttgattcacgctatgtccgggatatccggcttggtggtgctgccacatacaaacctgcgaacaatggtatgacatggacacatcaggcaccgtccgggtgtgtatattccggcattattgttcaggataccggctcaaactctgccgataacattggtggcgtatattacagaccggtgcagaaatacattaacgggacttggtataacgtggcacaggtataatttatgcagcatttgataaatataacggcaggtaatccaaaaacggttgaacaatatcaattgacaaaggactttgatgttgtctggtttttttcagaagatggtaagaactggtacgaagaacaaaagtattttgctgatgacacgataaaaatagcgtacgacaaagataatattatccgctatgtggaaaaggatgtgacagctatcagaccggatggattaagtgttgttgaagtgccggatattactgctaaccgacgggcggacatttcagggaactggatgtttaaggactgtacagtgattaaacgaatttatacggcagaggaattgcagcagcaggcagaaaatcggaaagccagacttcttgcagatgctgaatccgtgattttgccgctggagcgcgctgtcaggctgaatatggcaacagatgaggagcgcagtcgactggaggcatgggaacgctacagtgttctggtcagtcgtgtggatcctgcaaatcctgaatggccggaaatgccgcaataagttgtatgagctctggtgtgagcttacatatctatggcacagagtaaagcctaatctgagagtccgctctgtgccagaagtagacgcacaaggtgggcgtgtctttttcttaagctacatcgggctcttatatggggaatgagagtttttgaaacgcggttcttcatgcttcggactgtaaattcttgcatgattatctatcacaactttacttccaagaatatctcgagcttctcctaacgaccacacagtagaaagatcattagtcaaatttcgatagagagcacgaaaccccttgggttttttaagatcatataagaaatcaggaactttaactttaaaattaaaggtcggtagtttcggaagggaattaatagccgcaacagtattgtatacatgtacaagcttagttacaggtacaccttgtctagtcttgagcccatacttagttcgaatataatctgattctttcgatacttcagtaagcaatgctcttactgacttattagcttgaggcaattcattttcatcaaacaagcgctttatttctcgcattttctcacgggcccttacaaattcgttgttgtcccttatgttataagcagcttcaacaatacaacttggatcaccagtttcttttgcgagccatgccgaaaataaaggaagcgaagttgctgttgctacagctttaccaccagaatgaatatcaatgagatcatgacttaacgaagtggaaaagttttctacaatatgtttagcatagtcaaaaccatactgacagttttggcttaaatatgtctgttgatacgcctgacgtaatggatataaaaaagtatctgcttgaaggtacttagctgtgagagaataaaatactgcccgattagccagccatacaagcgaagccacgaatgctttgattgcatctgatgcttcaccagcagatgtgccatccccccattttgctccgggaactttgtaccccttgcgaatagggttgccaaatcgatcgagaagttcaacatcgccatttgttctattaccagactcagcagcatcacgcagttctgaaaaaatggcagcagcaatgttaccatatttttcaaactccttacctccatcagataagttcttcagtgttagatgataaacacttgaactaatgtcccatgtacatatgatatgtgtctgaagaagttcaattagttttttaaaatcgtcattaacaaatgttccaccacgaattttaggtttcaatgcatcagatattttttttgcttcactttcaatttcatccaacccatattgtgctttatcaagaaataatatctctctgaaacttgaaatcctactcccacggtactctggaatataatcatcaaccgcgataacgtgatcatagaacaaaatagactgtatatagttctcaaatgctattatgtctgtatctactgagtccttcgatcttgtttttactttcccctcgattctttggactgcagttagagttgaattatcaatcagtgcgtatgtcatttacattccttaaataaaaaacattaatggttgctccaaaaatactagcaaccttatttcagtgaagtcaattttttaacattaatcatttacacacgcttgaaaagtgatcgctgaaaatggcatttactacattatcaaagttcccatcgaagataatcgaaatttttcccggtagcagatatcgtgagatttaacgcttttcgctcatagcaggctgtcagatttgatagcgtttgggctatgtaaactgtcagtcggaaaatgagtgtgtacaaatcaggacatgcgggcgaattgcccgcattttctttatctgttgtttcatccactgaccagccaggtcaaatagcgtctcatgcactgcccaacagaaaatagttgcacccattaaccacggagttaaacggatgagtgactatcatcacggcgtgcaggtgctggagattaacgacggcacccgcgtcatttccaccgtatccactgccattgtcggcatggtctgcacggccagcgatgcggatgcggaaaccttccccctcaataaaccggtgctgattaccaatgtgcagagcgcaattgcaaaggccggtaaaaaaggcacgctggcggcatcgttgcaggccatcgccgaccagtcaaaaccggtcaccgttgtcgtgcgtgtggaagacggcaccggcgacgacgaggaaacgaaactcgcgcagaccgtttccaatatcatcggcaccaccgacgaaaacggtcagtacaccggactgaaagccctgctggcggcggagtcggtaaccggtgttaaaccgcgtattctcggcgtgccgggactggacaccaaagaggtggctgttgcactggcatcagtctgtcagaagctgcgcgctttcgggtatatcagcgcatggggctgtaagaccgtttccgaggtgaaagcctaccgtcagaatttcagccagcgtgagctgatggtcatctggccggatttcctcgcatgggatacggtcgccagtaccaccgccaccgcgtatgccaccgcccgtgcgctgggtctgcgcgctaaaatcgaccaggagcagggctggcataaaacgctgtccaacgtcggggtgaacggtgttaccggcatcagcgcgtccgtattctgggatttgcaggagtccggcaccgatgctgacctgcttaacgagtcaggcgtcacaacgctgattcgccgtgacggtttccgcttctggggtaaccgtacctgctctgatgacccgctgttcctctttgaaaactacacccgcaccgcgcaggtgctggccgacacgatggctgaggcgcacatgtgggcggtggacaagcccatcaccgcaacgctgattcgcgacatcgttgacggcatcaatgccaaattccgtgagctgaaaacaaacggctatatcgtggatgcgacctgctggttcagcgaagaatccaacgatgcggaaaccctcaaggccggaaaactgtatatcgactacgactataccccggtgcctcctcttgaaaacctgaccctgcgccagcgtattaccgataaatacctggcaaatctggtcacctcggttaacagcaattaaggagcctgaccgatggcaatgccgcgcaaactcaagttaatgaacgtctttctgaacggctacagctatcagggcgttgcaaagtccgtcacgctgccaaaactgacccgtaaactcgaaaactatcgcggtgcggggatgaacggaagcgcaccggtagacctcggccttgatgacgatgcgctgtcaatggagtggtcgctcgggggcttcccggattcggttatctgggagctttacgccgcaaccggtgtggatgccgtgccgattcgttttgcaggctcttaccagcgtgacgataccggcgaaacggtggccgtagaggtggtcatgcgtggccgtcagaaagaaatcgacaccggcgagggtaaacagggagaagacaccgagtcgaaaatctccgtggtctgcacctatttccggctgacgatggacggtaaggagctggtcgaaatcgacaccatcaacatgattgagaaggtgaacggcgtcgaccggctggagcaacaccgccgcaatatcggcctgtaattttcatccggtcagcctggctgaccggttaaccccgattcagaagtgagaaaaccatgaacaaagaaaatgtgattaccctggacaatccggtcaagcgtggtgagcaggttatcgaacaggtcacgctgatgaaacccagtgcggggacgctgcgcggtgtcagtctggctgcggtcgcaaactcagaagtcgatgcactgattaaggtgctgccgcgcatgacggcaccgatgctgaccgagcaggaagtcgccgcgctggaactgcctgaccttgtggcgctggccggtaaggtggtcggttttttgtcgccgaactcggtgcagtgacgcttccgaaaaatctgtcggtcgatgacctgatggcggatgtggcagtgatatttcactggccgccatcagaactgtatcccatgagcctgaccgaactcatcacatggcgcgaaaaggcgctcaggcgaagcggaaacacgaatgagtaacaatgtaaaattacaggtattgctcagggctgttgaccaggcgtcccgcccgtttaaatccatccgcagagcgagtaagttgctgtcgggggatatccgggaaacacaaaaatcactgcgcgagctgaacggtcacgcatcccgtattgagggattccgcaagaccagtgcacagctcgccgtgactggtcatgcacttgaaaaggcacggcaggaggccgaagcccttgccacacagtttaaaaacaccgaacgcccgacccgtgctcaggcgaaagtgctggaatccgcaaagcgtgcggcggaggacttacaggcgaaatataaccgcctgacagattccgttaaacgccagcagcgggaactggccgctgtgggaattaatacccgcaatcttgcacatgatgagcagggactgaaaaaccgtatcagtgaaaccaccgcccagcttaaccggcagcgtgacgcgctggcgcgtgtcagtgcgcaacaggcaaaacttaacgcagtcaaacagcgttatcaggccggaaaggaactggccggaaatatggcctcagtgggcgctgccggtgtggggattgctgctgcgggaacgatagccggagttaagctgctgatgccaggttatgagtttgcgcagaaaaactcagaattgcaggctgtgctcggtgtggcaaaagactccgccgaaatggctgcactccgcaagcaggcgcgccagctcggtgacaacaccgccgcctcagcggatgatgcggccggtgcacagattatcattgcgaaagcgggtggggatgttgatgccattcaggcggcaacgccggtcacgctgaatatggcgctggcgaaccgccgcacaatggaagaaaacgccgccctgctgatggggatgaaatccgcctttcagctttcaaacgataaggtcgctcatatcggggatgttctctccatgacgatgaacaaaaccgccgctgattttgacggcatgagcgatgcgctgacctatgccgcaccagtggcaaaaaatgccggtgtcagcattgaagaaaccgccgcaatggtcggggcgctgcatgatgcaaaaatcacaggctcaatggcggggacgggaagccgtgccgtgttaagtcgcctgcaggcaccgactggaaaagcatgggatgcactcaaagagcttggcgtgaaaacctcagacagtaagggaaacacccgaccagtatttaccattctgaaagaaatgcaggccagctttgagaaaaaccggctcggtactgcccagcaggccgaatacatgaaaaccattttcggggaggaggccagctcagccgccgctgtgctgatgactgccgcgtcaaccggaaagctggacaaactgaccgctgcgtttaaagcctcagacgggaagaccgcagagctggtaaatatcatgcaggacaacctcggcggtgactttaaggagtttcagtccgcttatgaggcggtggggacagacctgtttgaccagcaggaaggcgcgctacgtaagctcacgcagacggccacaaagtatgtgttaaaactcgacggctgggtacagaaaaacaaatcactggcgtcaaccattggcctcattgccggtggcgcgctggcgctgactggcatcatcggtgcaattggtcttgtagcctggccggttatcaccggcatcaatgccatcatcgcggcagcaggcgcaatgggggcaatcttcacgacggttggtagtgccgttatgacggccatcggggcgattagctggccggttgtggctgtggtggccgccattgtcgccggggcgttgcttatccgtaaatactgggagcctgtcagcgcattctttggcggtgtggttgaagggctgaaagcggcatttgcgccggtgggggagctgttcacgccactgaaaccggtgtttgactggctgggcgaaaagttacaggctgcgtggcagtggtttaaaaacctgattgccccggtcaaagccacccaggacaccctgaaccgttgccgtgacacgggcgtcatgttcgggcaggcactggctgacgcgctgatgctgccgcttaatgcgttcaacaaattgcgcagcggcattgactgggtactggaaaagctcggggtcatcaacaaagagtcagacacacttgaccagaccgccgccagaactcatgccgccacgtatggcaccggtggttatattccggcgaccagctcttatgcaggctatcaggcttatcagccggtcacggcaccggctggccgctcttatgtggaccagagtaaaaacgaatatcacatcagcctgacgggtggtactgcaccggggacacagcttgaccgccagttacaggatgcgctcgaaaaatacgagcgggataaacgtgcgcgcgcccgtgccagcatgatgcatgacggttaaggaggtgacgaaaaatgatgctcgcgttaggtatgtttgtttttatgcgccagacgctgccacaccagaccatgcagcgtgaatcagattatcgctggccgtcaaattcccgtatcggtaaacgggatgcctatcagtttctcggtgtaggtgaggagaacatcacacttgccggtgtgctttatcccgaactgactggcggaaagctgacgatgaccacgctcagactgatggcagaggaaggccgggcgtggccgttgctggatggcaccggcatgatttacggcatgtatgtcatcagcaaggtgagtgaaacagggagtattttctttgcagacggcacaccacggaaaattgattttacgctgtcgctcacccgcgttgatgagtcactggccgcgctttatggcgatatcggtaaacaggcggaatcgctcatcggtaaggctggcagtatggcgactaaattcacgggtatgacgggggcgggataatgctggatgcgctgacatttgatgcaggcagtacgctgacgccggattacatgctgatgctcgacagcagggatattaccggcaatatcagcgaccgtctgatgagcatgaccctgacggataaccggggctttgaggctgaccagcttgatattgaactgaacgatgccgacgggcaggtcgggctgccggttcgtggcgctgtcctgacggtgtatatcggctggaaaggttttgccctggtatgcaaagggaaatttaccgttgatgaggttgaacaccggggcgcgccggatgtggtcaccatccgcgcccggagtgcagattttcgcgggacgctcaattcccgccgtgaaggctcatggcatgacattacgctcggtgcgattgttgaggcgatagcctcccgtaacaggctggaagccagtgtcgctccgtcactggccggaataaaaattccacacatcgaccagtcgcaggagtctgatgcgaaattcctgacccgtcttgctgaacgcaacggcggcgaggtgtcggtaaaaatgggaaaactgctgtttctcaaagcggggcagggggtgacggccagcggtaaaaaaatcccgcagattaccatcacccgcagcgacggcgaccgtcatcattttgcgattgctgaccgtggagcttacaccggcgtaacggcaaagtggttacacaccaaagacccgaagccgcaaaagcagaaggtaaaactgaaacgcaaaaagaaagaaaaacacctgcgcgcactggagcacccgaaagcgaaaccggtcacgcagaagaaagcgccaaaagtaccggaagcgcgcgaaggtgaatacatggccggtgaagctgacaacgtttttgccctgaccacggtatatgccacaaaagcgcaggccatgcgcgccgctcaggcgaagtgggataaactgcaacggggtgtagcggagttctccatcagcctggctaccggtcgtgcagatatttacacggaaacaccggttaaagtgtcaggctttaagcgcgtcatagacgagcaggactggaccatcactaaggtgacacattgtctcaataatagcggcttcacgacgtccttggagcttgaggtaaggctttctgatgtggagtacgaaacagaagatgatgagtgacgtggtttatttatctgtttgttttataaggataaattaactaaaatggcaccatcaacaaaaccggaagaggtgctcgcgatgtttcattgtcctttatgccagcatgccgcacatgcgcgtacaagtcgctatatcactgacacgacaaaagagcgttatcaccagtgccagaacgtgaattgcagcgccacgttcatcacttatgagtcggtacagcgatacatcgtgaagccgggagaagtccacgccgtaaggccgcacccgttgccgtcagggcagcaaattatgtggatgtgatcaaaaaaatagcccctcagttgagtaatgccagtcagttaagcaactgactggctctttttcggggctgtggggtatttccagggcctctcctttaccactctcgggaaggccctttcccttctcgtcggtaatttcacaagttgtcccatacttgcaagatcgcgcatcagctccggtatacgtcccggtgaagcgccctgcaatgtcatcagcattctcatcaccattccgcatgattctgagaaactcagttgattcggccagtaacctttcagatgttccgccattttaatcatctgatatctcaccagattataagccagtaagacaccccacagctcttgctccacaagctccggctttttacttctcagcgtcagcctgctcagttgcatcgtctgttttatctccctgtatcccagttcgatttcccagcgatgactgtacagatccgccatttctcctccggggaagcgcatggcgtccgtcatcgacgtcagcagatggcagacttttcctttgcgcgtcacggtcagcaggcgggctgtcacttcatttcccagtcccggccacttttttcgtgcctgcgggctggttttcagcttcaccagatgatcgcctttacccagttttctgagctcttcatattgcgctccctttctgagaggtatcatccagtggcggtgttctcccgccaggctccaggcatttaacagtcccagtgagtaataacctttatccattaacgtcagagtgttatcgccggtttgttctataagttgctcagcaagctcattttcgctgttcttcatcgtgccgaaggctgcagccgtcagcagatggctggtcagttccatctggcagaccattttgacctgcgggtagagcgccgggttcccggcatgtgtctggcgggggaaggctgcatcgttctctggtgtatccggtgtgcgccagaacacaccatcgatggccagcagggtcaggccgcaccagtgcggatgcggcgtggcgttatgccagagctgcgctgttttcgtgaacacgcggcggacagcctcacttcccaggcgctggcgggcctgaataacggcactgggggcaacgaaggggcgattgcccggcagcatgatgtccaggcgattcacaatctggtgaagaggttctttacgctcaagcgccatgccaacaatacaccagaccatcatttcgaggggaagacggcgcttgcgtagcgttacagtacctgattcggcaaggcaacgagagatgagttcggggtcgaggtaatcccccagagaagtcagtgggttacgcagagaatcgtaacgggataccagatcaagagcctgtccaatgtgcataaaaaaatccggaaacaagtgagcgtttccggattcttacacagccactggatcggtcaactgatccttaactgatcggcattacccctcagttgaggggcttatttatggtcgatgtggacgctatgtggacagcggttgacataaatccatttatatcatcaggttaggtacttttttgtgacaccatccctgtcttcccccacatgatgtgggggtttttttatcctcaatttgcctgctgcttaatgcattgcagatgatttgcttccgttatactagcgtcagttgatagcgggagtatttatgaatcaatcttatggacggctggtcagtcgggcggcgattgctgcgacggcgatggcttcgctgctattgctgattaaaatttttgcatggtggtataccgggtcggtgagtattctcgccgcgctggtggattcgctggtggatatcggcgcgtcgttgacgaatttactggtggtgcgatattccctgcaacctgccgacgataatcactcgtttggtcacggtaaagctgagtccctcgcggcgctggcgcaaagtatgtttatctccggttcggcactattcctgtttttgacgggtattcaacatctggtatctccaacaccgatgacagatccaggcgtcggggttatcgtgacaattgtggcgctaatttgtacgattatccttgtctcgtttcagcggtgggtggtgcgccggacgcaaagccaggcggtgcgggctgatatgctacattaccagtctgatgttatgatgaacggcgcaattctgctggcgctggggttgtcctggtacggctggcatcgcgccgatgctctgtttgcattgggaatcggcatctatattttatatagcgcgttacgcatgggatatgaggcggtacagtcattactggatcgcgcattgcctgatgaggaacggcaagaaattattgatatcgtgacttcctggccgggtgttagcggcgctcacgatcttcgcacgcggcagtcagggccgacccgctttattcagattcatttggaaatggaagactctctgcctttggttcaggcacatatggtggcggatcaggtagagcaggctattttacggcgttttccgggatcggatgtaattatccatcaggacccctgttccgtcgtacccagggagggtaaacggtctatgctttcataatcagtataaaagagagccagacccgcattttgtgtataaaataccgccatttggcctgacctgaatcaattcagcaggaagtgattgttatactatttgcacattcgttggatcacttcgatgtgcaagaagacttccggcaacagattttattttgcattccaaagttcagaggtagtcatgattaagaaaatcggtgtgttgacaagcggcggtgatgcgccaggcatgaacgccgcaattcgcggggttgttcgttctgcgctgacagaaggtctggaagtaatgggcatttatgacggctatctgggtctgtatgaagaccgtatggtacagctagaccgttacagcgtttctgacatgatcaaccgtggcggtacgttcctcggttctgcgcgcttcccggaattccgcgacgagaacatccgcgccgtggctatcgaaaacctgaaaaaacgtggtatcgacgcgctggtggttatcggcggtgacggttcctacatgggtgcaatgcgtctgaccgaaatgggcttcccgtgcatcggtctgccgggcactatcgacaacgacatcaaaggcactgactacactatcggtttcttcactgcgctgagcaccgttgtagaagcgatcgaccgtctgcgtgacacctcttcttctcaccagcgtatttccgtggtggaagtgatgggccgttattgtggcgatctgacgttggctgcggccattgccggtggctgtgaattcgttgtggttccggaagttgaattcagccgtgaagacctggtaaacgaaatcaaagcgggtatcgcgaaaggtaaaaaacacgcgatcgtggcgattaccgaacatatgtgtgatgttgacgaactggcgcatttcatcgagaaagaaaccggtcgtgaaacccgcgcaactgtgctgggccacatccagcgcggtggttctccggtgccttacgaccgtattctggcttcccgtatgggcgcttacgctatcgatctgctgctggcaggttacggcggtcgttgtgtaggtatccagaacgaacagctggttcaccacgacatcatcgacgctatcgaaaacatgaagcgtccgttcaaaggtgactggctggactgcgcgaaaaaactgtattaatgatttcggaaaaaggcagattcctttagcctgaaaccgatgacagaagcaaaaatgcctgatgcgcttcgcttatcaggcctacatgaattctgcaatttattgaatttgcaaacttttgtaggccggataaggcgttcgcgccgcatccggcatggacaaagcgcactttgtcagcaatatgaggcggatttcttccgcctttttaatccctcaacatatacccgcaagttatagccaatctttttttattctttaatgtttggttaaccttctggcacgctttgctcatcacaacacaacataagagagtcgggcgatgaacaagtggggcgtagggttaacatttttgctggcggcaaccagcgttatggcaaaggatattcagcttcttaacgtttcatatgatccaacgcgcgaattgtacgaacagtacaacaaggcattcagcgcccactggaaacagcaaactggtgataacgtggtgattcgtcagtcacacggtggttcaggtaaacaagcgacgtcggtaatcaacggtattgaagctgatgttgtcacgctggctctggcctatgacgtggacgcgattgcggaacgcgggcggattgataaagagtggatcaaacgtctgccggataactccgcaccgtacacttccaccattgttttcctggtgcgtaagggcaatccgaagcagatccatgactggaacgatctgattaaaccgggtgtttcggtgatcacgcctaatccgaaaagctctggtggcgcacgctggaactacctggctgcctggggctacgcgctgcatcacaacaacaacgatcaggcaaaagcacaggattttgttcgggcactgtataaaaacgtcgaagttctggattctggcgcgcgcggctccactaacacctttgtcgagcgcgggattggcgatgtactgatcgcctgggaaaacgaagctctgctggcagcgaatgaactggggaaagataaattcgaaatcgtcacgccgagtgagtctatcctcgcagagccaaccgtgtcggtggtcgataaagtggtcgagaaaaaaggcaccaaagaggtggcggaagcctacctgaaatatctctactcgccagaaggtcaggaaattgccgcgaaaaactactaccgtccgcgcgacgctgaagtagcgaaaaagtacgaaaatgcgtttccaaagctgaagttattcaccattgatgaagagttcggcggctggacgaaagcgcaaaaagagcattttgctaacggcggtacgttcgatcagatcagcaaacgctgatttccccaggataattatcaaacccggtggtttctcgcgaccgggttttttatttgtcacgattttgcgttacccttgcatctctttgaggtacagggaaaaaaagatgaaaaaagcgggtcttctttttttggtgatgatagttatcgccgttgtggctgccggtattggttactggaaattaaccggtgaagagtcggatacattacgtaagattgtccttgaggaatgtttgcccaatcagcagcaaaatcaaaatccttcgccatgtgcggaagtcaaacccaatgccggatacgtggttttaaaagatcttaatggtccactgcaatatctgttgatgccaacgtatcgtattaacggtactgaaagtcctttgttgaccgatccttcaacgccgaacttcttttggttggcctggcaggcgcgtgattttatgagcaaaaaatacggccagccggttcccgatcgcgcggtttctttggcgatcaactcccgcaccgggcgtacgcaaaaccattttcatattcatatctcttgtattcgtcctgatgtgcgcgaacaactggataacaatctggcgaacatcagcagccgctggttgccactgccaggtggtttgcgcgggcatgaatacctggcgcgtcgggtaacggaaagcgaactggtacaacgcagcccatttatgatgctggcagaagaagtacctgaggcgcgggaacatatgggaagctacgggctggcgatggtacggcagagtgataactcatttgtattgctggcgacacaacgaaatctactgacgcttaaccgtgcttcagccgaggaaattcaggatcatcagtgtgagattttgcgttaaggcgaagagttaaggaaagtaagtgccggatatgaaatccggcacctgtcagacttaagcctgtttagccgcttctgcagctttaacgatcactgcgaaagcgtcagctttcagagaagcaccgccaaccagcgcgccgtcgatatctggctgagcaaacagttctgcagcgttagacgcgtttacagagccgccgtactgaatgatcacttgttcagcgatgttagcgtcaactttagcgatgtggtcacggatgaatttgtgaacagcctgtgcctgagccggagttgcagatttgccagtaccgattgcccatacaggttcgtaagcgataaccgcaccttcgaatgccgcagcaccctgagttttcagtaccgcgtcgatctgacgtgcgcaaacttcttcagttttgcccgcttcgttttcagcttcggtttcaccgatgcacagaaccggagtcaggccctgctctttcagcaccgcgaattttttcgcgatcagttcgtcagactctttgtggtaagtacgacgttcagagtggccgatgatgatgtactgagcgccgatgtctttcagcatagcggcagaagtttcaccggtgaatgcgccggacaggttcaggtccacgttttgcgcacccagcatgatgtggctgccttcagcttcgcgcttcgccatatcgatgtacatttccggtggtgcgattgcaaccgcacagccagcaacacctgccagctctttacgcaggttagaaaccagctcgtgaaccatgtggcggctgccgttcagtttccagttacccatcactaaaggatgtcgcattttaattctccacgcttataagcgaataaaggaagatggccgccccgcagggcagcaggtctgtgaaacagtatagagattcatcggcacaaaggctttgctttttgtcatttattcaaaccttcaagcgattcagatagcgccagcttaatcggttcaacagcgaaggtcagccccttttcgccgttgtccgcgacaacataacgcagtgcaccttctgtctcggtgtaataacgtttgtttttccccgccgttagtagcgactgcagttttttctggctttgtgttttggtcattaatggggtgagtgtgcggatcactgctgccatgtattcctgagctttcgctttcgctgctttttgctctggcccctggatgggtagccaggtcatttgaatgcttttgatttttaaggtaccgcgctccagcgctgtagaagcatacaagttctcgttaattttacttgcagcacgagtgagattggctttgtcgggactgctgtcgatggcacgaaattcgttcagtggcaggctaggattctggctgttaaagtcttctcgaaactggctgatggagagatcgaaagtaggggctccagccagcagataaggcgcggtcgttgccgtatctggtgtttgtgcatgcgccgttgttgtaacggttaatgcagaacataagagaaaaaacagcgtacaccctggcttcattgacagtaccttttgttatgactggctccgattaaaacgatatctgtcgcccttgtcaaaagggtagaatcctggaaaagacaaccatcaaggaacttacatgaccatacagcaatggttattctcatttaaagggcgtattggacgccgtgatttctggatttggataggcctgtggttcgcaggcatgctggtgcttttctcactggcgggtaaaaatttactcgatattcagaccgcggcgttttgccttgtgtgcttgctttggccaacagcggcagtaactgttaagcgcttgcatgatcgcgggcgttccggcgcatgggcatttctgatgattgtggcgtggatgctgctggcgggtaactgggcgattttaccgggtgtctggcaatgggcggtggggcgttttgtcccgacgttgattctggtgatgatgcttatcgatcttggtgcgtttgttggcacacaaggcgaaaataaatatggtaaagatactcaggatgtgaagtataaagccgacaataaatcaagtaattaacctttaatatatctcttactgctatttttttccgggattgttatttccacgatgcaaatgacaatacccggaaaatccttctgaactcttcaccttaagcaatatcaaaaaaaatggtaatccataagatcattacttgtttgttcttcccttaacggcgcattattcttaagtcgtaatcgacagagaggcgaatatacagaggtgccctatgaaagatgtcgtagataaatgcagtactaaaggatgtgcgattgatatcggtacggtgattgataacgacaactgtaccagtaagttttcgcgcttttttgccacccgcgaagaagcagagtcttttatgaccaaactgaaagagcttgccgccgctgcatcctctgcagatgaaggggccagcgtggcctataagattaaggatctggaggggcaagttgagcttgatgcggccttcactttctcatgccaggccgagatgattatttttgagttatcactgcgttcgttagcttgatggagttgctttagaaggagttaaacatggcttataaacacattggcgtggcaatttccgggaatgaagaagatgccttactggtgaataaagccctggagctcgccagacataatgacgctcacctgacgttaattcatattgatgatggcttaagcgagttgtatccgggtatctacttccctgcaacagaagatattcttcaattgttgaagaataagtcggataacaagctgtataaactgacgaaaaatattcaatggccgaagacaaaactgcgtattgaacgcggagaaatgccggaaacactgctggaaattatgcaaaaagagcagtgcgacctccttgtctgtggtcatcaccactcatttatcaaccgtttgatgccggcatatcgcgggatgatcaataagatgagtgcggatttgctcatcgtgccgtttatcgataagtaaccgcttaccagtaatgctccgctgtcatatggcccggtcggcgacgtaaatgtttcgtcatctgccgggtctctttcagcaactgttgtgtatcgcgcaccatctgtggattgccgcacagcatcacatggctggtttctttattcatcggcaggccaatcgcgctttccagttccccactttcaattaatgccggtatccgtccggtgagcgaccccgctgccgtttcccgactgaccaccgtctgaatgcgcagtttgccttcgtagcgtttttccagttcttgcatcagtggcaaatagcttaagtcggcggcataacgtgcggcgtgaaccaggaccagatttttgaagcgatctaaatctttgcctagttgcagaatcgataaataagggccaatcgctgtaccggttgccagcatccatagcgtttcgcaatctggtacttcctccagaacaaagaagccagctgcttcgctaaccacctgcacttcatcgcctggtttcagtgccgccagtcgtgggcttaatttgccatcggggacggtgaccaggtaaaactccagatcgggattatcgggcgagttaacataggagtaggcgcgctggacgcgttcgccgtcgatttcaaggccaagcttggtgaattgcccggcggtaaacggaagcacgggggcgtgaacggtgagactaaacagggcgtcggtccagttctgcactttagtgactttgcctgttacccaatcagccatgtttttctcctgttttgattgacttgccttatcttcgttctccgaacaaaaaaattccagtcccgaaggactggaaggctcaatcgatcaaatcaatcagaggatgtgcacctgcatttccgggtccttgcgatccagatagtggatagactgaatgcggcgaatggtgcgtgacttgccgcggatcagcagcgtttcggtagtcgcgatattgcctttgcggctaatgccttccagcagatcgcctttggtaataccggtggcagagaagatgacgttatcgctgcgcgccatatcgcccaggcgcaatactttaccggcttcgatgcccatcgctttgcagcgtgccagctcctgctcgccaatgcgacgattctcttcgttgtcgcctttgacgtcatgacgcgccagcagacgaccgttcatgtcgccatctaatgcgcggatcaccgccgcagaaactacgccttccggcgcgccaccaataccgtacagcacgtcaacttcgctgtctggcatacaggtgagaattgaggccgcaacgtcgccatccggaatagcaaatacgcgtacgccgagttgttgcatttcagcgataacggcatcgtggcgtggtttagccagaattgttaccgtcagttcgctcaacggtttgccgagcgccgccgcaacattgcgcaggttatccgccagcggcaggttcaaatcaatggtgcctttggctcccggtccgacgatcagcttctccatatacatatccggcgcattgaggaagcagcctttatcgcctactgccagcaccgccagcgcgttagcctggcccatcgccgtcatgcgcgtgccttcaatcggatcaacagcaatatctaccgcgtcgccgcgaccagtaccgactttttcaccaatgtagagcatcggtgcttcgtcgatttcaccttcaccaatgacgatggtgccgtcaatattgacctggttgagcataatacgcatggcgtttaccgccgcgccgtccgcggtgtttttatcgccgcgtcctaaccatttgtagccagccagcgccgcagattcggtgacgcgggaaaattcgatggcaagttctcgtctcatagcaaactctaagcagtaaggaatggcgcgaagtgtagcacaggggaagggagggattattgatgtgtgcggggttgcccccgcacgtttcgggactaccggatgcggcataaacgcttcatccggcatttacattacgtcgtgttcttcccacgccatcgcgcgtttaaccgcttttttccagcctgcgtaacggtaattacgctcagtggtttcgatgcctggacggaactcgcgctcaatcaccgctttctcttgcagctcgtcgaggttctgccagaaaccgaccgccagaccagcaagataggccgcgcccaatgcagtcacttcgcgaacttccgggcgctcaacgcgggtgccgagaatatcggactggaactgcatcaggaaattgtttgctactgcgccaccatccacgcgcagggcgtgcagacggataccagagtcggcctgcatcgcttccagcacgtcacgcgtctgataagcaatagactccagcgtcgcgcgtataatgtggttagcgttcaccccacgagtcagaccgaaaatcgccccgcgcgcatacgggtcccagtacggcgcacccagcccggtaaaggccggaaccacatacacaccattggtgttttgcactttggtggcgaaatattcggaatcgtaggcgtcgttaatcaacttcatctcatcgcgcagccactgaatggatgcgcctgccataaacaccgcaccttccagcgcatagttcacttcgccagtcgggccgcaggcgatggtggtcagcaggccgttttctgatttcaccgctttctcgccggtgttcatcagcataaagcagccagtgccataggtgttcttcgccatcccttctttcacgcacaactgaccaaacagcgcggcctgctggtcaccggcgatcccggagattggaatacgcgtgccgcctttgccgccaatgttagtctgaccgtacacttcggaagaacgacgcacttctggcagcatctcgcgcggaatatccagcacttccagcattttgtcgtcccagtccagggtatggatgttgaacaacatggtacgagaggcgttggtgtaatcggtcacatggacacggccctgagtcattttccagataagccacgtatcaaccgtaccaaacagcaattcaccacgacgcgcacgctcgcgagagccttccacatggtcgaggatccacttcactttggtgccagaaaagtacgggtcaatcaccagaccggtattgctgcggatataatcttctaaaccgtcacgttttaaatgctcgcagatttctgcggtacgacggcactgccagacaatggcgttatagataggcttgccggtttctttttcccagacaatagtggtttcacgctggttcgtaataccgatagctgcaatttgatcggaactgatatcggctttcgccagcacttctaccagcgtggagctttgggtggcccagatttccattgggtcgtgttctacccagcctggttttgggtagatttgctcaaattcgcgctgcgacacgctaatgatattggcatcgtgatccattacgaccgcgcgggagctggtggtgccctggtcgagcgcaacgatatattttttttcagtcatgtttaattgtcccgtagtcatattacagcgaagctttttgttctgaaggagttgtggtctccttttcttccacaacacagatatcgcaaggcaaatggcgaccaatcagtttgcggtaggcaaatgcacctacaatcgcgccaacgatagggccaaaaagcggcaccaggaagtaaggaatgtctctgccgccggtaaaggcgacattgccccagcccgccagccaggcaaagactttcggaccgaagtcacgcgctgggttcatggcaaaacccgtcaatgggcccatagatgcgccaatgaccgcaatcagtagaccaatcagcaagggagccaaagggccgcgtggtacaccgttgccatcgtccgttaacgccaggatcagccccatcagaatagcggtaatcaccatctcaactgcgaaagcctgcacaaaattgatatgaggattagggtaagtagagaaagtgcctgccagatcaacactttcaacactgccgcgaacaatgtgatgagtctgctcgaagtcgaaaaataaattgtagtaaagcccgtaaactaaagccgcagcacagaaagcgccggcaacttgtgaaacgataaaaggaataactttgcgcttgtcgaaacaggcaaacagccacaatgcaatggtaacagcgggattaagatgcgcgccggaaacccctgcggtcaggtagatggccattgccacccccagtccccaaatgacactgatttcccactgaccaaaagacgcaccagcgacttttagtgctgcaacgcaacccacaccgaaaaaaatcaacaacccggtaccgaggaattcagcaatgcactggcctttcaaggttgatgtttgactcataatcggatcctgaagagttaatgtttgttgtatgcgtgaaagtcacggacctccacgatgcttgtaggcatgctgtaaacttatcgttaacgagcaaaaacgagaaatatcgaacttaaaatgtgtgtgcttcgtcataaaatgagcgttatcgcgcaatttattccatctgattgtacatgatgcatgtttgttagatcattcgcgcaacaaatttattaacattttcgattgatgtggattatgtcaccaggagaaggatgaaaagtgtggcaaaccgtaatctgcaaggcgtgccgctggacagcgatggcgcggcttcatacaatcggagctaactaaagtgcgctcgtatttattaaggcgtcaccggtaatcgggacgaggattttttatccatcaacgccttgcaattcaggagaggtatgacaatgtcattagaagtgtttgagaaactggaagcaaaagtacagcaggcgattgataccatcactctgttgcagatggaaatcgaagagctgaaagaaaaaaacaactcactgtcgcaggaagttcaaaatgcccagcatcagcgcgaagagctggagcgtgagaacaaccatctgaaagaacagcagaacggctggcaggaacgtctgcaggccctgctgggtcgcatggaagaggtctgattacgcttcatctttcgcgtaatttctttactgtgtaggccaacaggtaacgcagaaaaaaggcaccttgcggtgcctttcttatcattcaatatccagcggatcttctgaaagaataatcccggtattgtcggcataaagatggtcgccggagaagaaggttacaccgccaaaattgacgcggacatcgctttcgccaatgccttcgccagcggcaccaaccggaattgccgccatcgcctggatgccgatatccaactcttctaggtcatctacctgacgcaccgcgccgtaaataaccagaccttcccattcattttgtactgccagacgcgccagttcagcatcgaccagtgcgcgacgaacagaaccaccgccatcgacgacaagaacacgaccacggccattctgttcgagcagatcgtacagcaacccgttgtcctcgaaacattttaccgtgattatttgtccgccaaacgacgcccgtccgccaaagttggagaacagcggttccacgacgttaacatcttcttgatagatgtcacaaagctcggaagtatcgtatttcataggcttaacattcagttgctgcgagaattttcagtatatcgcgctatgtaggctgttggcaaaatcatcaattgttaattgatatttgtcagttatgctgcccactggcttaggaatatccctaaaacaaacagcaggttagtcagtaacgctcccttgacagtacgttccagcattggtcgcatcgccaccgggtccatttcccgcatcacataacgggcttgcttcaccagtaatggtgccgccagcaggaacagccagccccacaggctatgcagcgaaaagagattaaacagcgccagacataccagagagcccatcagcaggcaggcatgataacgacgcgcgttcacttcacctaagcgcaccaccagcgtgtttttgccattttcgcggtcgctattgatatcacgcaggttattaatgttcagtactgccgttgccagcaggccacaggcggtcgccggaaggatcagtgccggaatcaatgtatgagcctgtaaataccagctccccatgacgctcaaccagccaaagaaaaccagtacggaaatatcacccagaccgatataaccataaggacgattgcccacggtgtaggtgatagcggcaatgatcgacaacccgccaagaatcaggaaaccgacaaaatcggccagcgtatggcatgccactgcaaccagtgccagcccggagagacagatgagcacgacggtaataatgagcgcccgtttcatctcttgctgggtaatgacccctttttgcatgccgcgtagcggcccaatgcggtcaggtttatcgctgccttttaccgcatcgccgtaatcattggcgaggttagaaaggatctgtaatagcccggcggtaattagtaccagcagggcgaccagcggatcgaagtgaccttgccaccatgccagcgccgtcccgacgataattgcagcaaaggcgagggggagggttttaggtcgtaaactttccagccacgcctgagttcggctaatttgttgttcagtcataatacgcgccaataaaaatggggcctttcagccccatcaaacaatgatgaaaatgattgaacgcgattataggataaaacggctcagatcttcatctgccaccaacgcatccagatgtttgctcacataatctgcgtcaatagtgatattttgaccgcttaaatcgctggcgtcgtaggaaatctcttccattaaacgctccagaacagtgtgtaaacgacgagcaccgatgttttcggtagattcgttcacctgccatgccgcttccgcgatgcgcttaataccggagtcggtaaactcgatatttacgccttcagtcgccatcagtgctttgtactgcacggtgatagaggcattcggctcggtcagaatacgctcgaagtcgctggtggtcagtgcctgcagttcaacgcggattggcagccgaccttgcagttccgggatcaggtcagacggtttcgcaatctggaacgcgccagaagcgataaacagaatgtggtcagttttgaccatcccgtgtttggtggaaacggtgcaaccttctaccagcggcagcaggtcacgctgaacgccttcacgagaaacatccggaccggaagactcgccgcgcttacagattttgtcgatttcgtcgataaacacgatcccgtgctgctcaacagcgtcgatagcgtcttgcttcagctcttccgggttcaccagtttcgccgcttcttcttcaatcagcagcttcatggcgtctttgattttcagcttacgcgctttttgcttctggccgcccaggttctggaacatggactgcagctggctggtcatctcttccatgcctggaggagccataatttcaacgcccatcggtgctgcggcaagatcgatctcgatttctttgtcatcaagctggccttcacgcagttttttgcggaatgcctgacgagcagcggacggttcctgctgctgttcggtctgtccccagttgtttttagcaggtgggatcagcacgtcgagaatacgttcttctgccagttcttcagcgcgataacggtttttctcgatagcctggacgcgtaccattttcacggcggcatcggtcagatcgcgaataatagaatccacttccttaccgacatagcccacttcggtgaatttggtcgcttcaactttgatgaacggcgcattcgccagcttagccagacgacgggcgatttcagttttaccgacaccggtcgggccgatcatcaggatatttttcggggtcacttcatggcgcagctcttcgttgagctgcatgcgacgccagcggttacgcagagcaatcgccacagaacgcttggcgttgtcctggccgatgatgtgcttatccagttcgctgacgatttcgcgtggggtcatttcagacatgggagatccttacgctttgtagcttaattcttcgatggtgtggaaatggttggtatagatgcaaatgtcgcctgcaatatccaacgccttttcagcaatttcacgggcgctaagttcagtgttttctaacagcgcgcgcgccgcagcctgggcgtaagggccgccggagccgatagcaataagatcgttttctggctgcaccacgtcaccgttaccggtgatgataagcgatgcagtttcatccgcgactgccagcagtgcttcaagtttgcgcagcatgcgatcggtacgccagtcttttgccagctcaacggcggctttgaccagatggccctgatgcatttccagtttacgttcaaacagttcgaacagcgtaaaagcatccgcagtaccgcccgcaaagcccgcgatgactttgtcgttgtacagacggcggacctttttcacgttgcctttcattacggtattgcccaacgtggcctgaccatcaccagcgatgaccacatggccgttacggcgtacgcttactatagttgtcacgagctgaccccttggttacgaatacagagtacaaaccccgtacaaaagtacggggcataatgcaattatagatgggggggattttgagggtttcaacccccggcggcgagccgaatgcagtttgtatgacccgccatcttcaaccgattgagggtgctgtctgcgttctctttgcctttcaccgggccaatgaccacacgattccagccattgttggtggtgattttcgagtcaaatccttcgaacgccagctgagcacgtaccgtctctgcctgttccgcgcctctgaacgaaccgcactgcaccatccagcggcgttcgtcttttttctccgccgtcggttttggcgcgtcagcggcacgagcaaccggcgcagcttgctgcggcttcgactgcgcggtcgtgtgcgcaggggtttgcagcagatcctggtacggctgctgagtagaagccggtttagactggcgcggttgcgcctgtaccggcgcggcttgcgacgtacgcgtctgctgctgccagctttgttcagtcgtacgcgactgctgagccaggcgttgctgctccgctaattgctgcgcctgacgctggcgttgtagcgtttgctgacgctgttccggcgtctgttcattccacggaacttcaaccagctgcgttggctgctggcgcatatcagcctgcatttgttcaagaagctgacgttgttctggtgtcagttgctccggcgttttcacttcaccaccggcagaaggttctgtgggcgcacgcacacccggctggcgactttccagctctttaatgtagcgccagcgttcttctggttttggtggtagtccgttaccggtcactttctggctttgcagcgtctcggactcttctttcttgtgatgcgtaatgaagtacagaccaccgataaaggtcacaagcacggcggcagcaatagcgaccatagcgggagaaaccgcaggcagatttcgttgctttttccgtgaggtgctcttttttcgccgcgaaggtgccggttggctgcggcgtacataatctcgttgtgccactatcgtttcgctgtatttattcgttcgtcagcccgccatgttacttaagcggcgggcctttgaccagtcacggcagtcttaaaggtttactttaaggtaacgcgcgtgttgatccccggatgataagttcgcagtccattaaacgagagccactgccaacgtgttgcccctgcatttgatcaagcaataacagcatagcttcccgaccgatttcgtaacgcggctgcgcgatggttgtcagcggcggatcacaaaattgcgtcaggtcgatgttatcaaaaccgattatggaaaggtcttccgggactttcagcccctggcgttttgcctgagaaagtgcgccgagcgccatcacatcgctatggcagaagacagcagtaggcggttgtggaagatcaagcagctgctgcatcgctttgcttccggcttcgaaggtgaagtcgccacgggcgatgtattgcggatcaaccataatgccgcagcgacgcagcgcctgaacgtaaccttgcaggcggtagtgacacagcggcatctcttcgggaccggctatacagccaatccgtttatgcccttgctcatatagataatttactgcatcaaatgcggcggtcagattgtcgatatgaactgtaggtagctccagttccggtgcgaattcgttcgccatcaccatcggcggcagattacgctgttcctcaatgctggcatcaaacggcagccttgaacccagcagcaacatgccatcaatttgcttggtgatgatcaaatcgataaaggttttttcctgctgattttgatgcgcacagtcgccaatcagcaccagatatccgtgatttgccgccgtaacttcgataccgcgaataatttcgctaaagaagggatcgcagatatccgggacaatcaccagaatggtgcgggattcattacgcttgacgttgcgccccataggctgcggtaaataacccacttcccgggccgctttttcaacccgattacgggtggcctgggagactttatcgggattcattaatgctcgggagacagtcgctgtagagacttttgccttgagggcaacgtctttcatggtcgcggcagtttcctgcttcttcgctttcacactcactcctcgcctggcacgtcaggcgtactacatccatgtttacttcacatcggcaacatttttagcagatagcgcgtgaaaacggttacagaattttcatgaaaagtgtgatgaatattgaatttttcgatccgcctcgcatcgtgagcggtttaaccctcaatcggatcaacatccagcacccatttcaccttacgggaatccggtattgtattgatgagtgccagcgtaccgttaatgatgtgttgcaagcgcacgcgggaagggtgctgcaacaatatctgccagcgccagcgaccgccacgtttaggtgccagtgccggaaccggaccgagaacccacaatttgtcgtctgccagcgggctggagaggatcagattacgcagttgttgcaggaacagcggcgcatgctgattgttatgatcttccgcacgcacaatcacatggctggtccacggcggcagctgcatcatgcgtcgctcagccagcgcctgttcggcaaaggcgtcgtagcctttatagagcaacgtttgcaacagaggatgttccggatggtgcgtttgcagcaccacttcgccctgtttacccgcacgcccggcacgaccggcgacctgggtgtaaagctgagcgaaacgctctgccgagcgaaaatcggcagaaaacagcgcgccgtccacatccagtaacgccaccagcgtcacatccggaaagtggtgacctttcgccagcatttgtgtgccgatcaaaatcctcgcaccgccgcgatgtacttccgccagttgctgttccagcgcccctttgcggctggtggtatcgcggtcgatacgagaaatgggcacatcagggaacagcggcgcaagcgtctgttcaagctgttcggtgcccagccccacgggtaccaggtgcgtggaaccgcaggaagggcactggcgcggcaccggacgctgactgtcacagtggtgacagcgcaaatgctgttgcgcctgatgcagcgtgtagtagtgatcgcaacgtgggcattcggcaatccagccgcagtcgtggcacagtagcgcaggcgcaaagccacggcggttaagaaagaggataacctgattgttggcctgtaaatgctggcgcatacgggtgattaacgccggagccagacctgcctgcaccttctgaccttttaaatccagcacgtgttgaattgccggacgcgcattccccgcccggcgcgtcaggcgcagcaggcggtattttttctgctggacgttgcacaacgtttccagcgcgggcgttgcggagccaagaataatcgggatttgctcgctatgcgcacgatacaccgccaggtcgcgggcatgatagcgccagccttcctgctgcttgtaggaactgtcgtgctcttcgtcaatgacaatcacgccgagatttttaaacggcgtaaacagcgcggagcgggtgccgatcacaatcgccgcctcgccatttttcgctttcagccacgccgaaagacgctcgctgtcgttcagaccggaatgcagaacttccacgggcgcattaaaccgttcacgaaaacgggcgatagtttgcggtgtcaggccgatttccggcaccatcaccagcgcctgtttgccctgagcgagcacgttttccagtacactgagataaacctccgttttaccggaaccggtaacgcccgccagcagccaggcagaaaaagtatctgccgcgctatgaattgcgccaacggcggtggcctgttcggtattcaatcgcaaccgctcaccagaaacggcatagttcgttcgccagtcgctaaactctggtgtttcacttgctaaatcacacagaccttttttgcgcagcgtctgcaacgcggcatcattaaattcgagcgtggcaacctggtcgcgccagattttcccttgccgtaacgccgccagcgcctgttgttgcttgggtgagcgtttcaggctgttcagatccaccgcctggccttgttcagtggcaaaccagtaccacatcggcgcgttcgccgcaggccgcccctggcgcagtaaaatcggcaaggcatgaaacagcacatcgccaatcggatgatgatagtaatctgccgcccagagcagtaatcgccagacggagtgagtaaataccggctcaacgtccagcacttcaactaccgctttcagctcgttaagcggcagctcactgacatcgctaactgataccacaaccccgatgcgctcctgctgtttgccaaacggcacgcgcacgcgacacccggctttaaccgccatgccttctggcagcagatagtcaaaggtacgaggaagcggaacgggcaaggcaacgtgggcaacgggcatagcatcatcctgacttgaaattcggtgggttagtatacacattgccgtagaagagtgcggatcagtttgcatacgctggttaatttctgtatgatttcgcgccttcgtacgaaatgatcgtattgaagctatacttttaacatcgcgtggtgtctggcgttagggctggaagagcgacgcggccttaaaccgaggttttcccatgaaaaaagatattcacccgaaatacgaagaaattactgctagctgctcttgcggtaacgtaatgaaaatccgctccaccgttggtcatgacctgaacctcgacgtgtgcagcaagtgccacccgttcttcactggcaaacagcgtgatgttgctaccggtggccgtgttgaccgcttcaacaagcgtttcaacatcccgggcagcaaataagaccggatttccgaaaaaagcgccgcacggcgctttttttgtgcctgtaatttgccttttataaattctgaaaaattccggggtgttaactcattatcatttcctgttgttgactggcgctaggcttctggttcttatttatttcaaaaggattttacgatgagcggaaaaccggcggcgcgtcagggcgacatgacgcagtatggcggtagcattgtccagggttcagccggggtgcgcatcggtgcccccaccggcgtggcctgttcggtgtgccccggcggggtgacgtccggccatccggtcaatccgctgctcggtgcgaaggtccttcccggtgaaaccgacatcgccctgcccgccccgctgccgttcatcctctcccgcacctacagcagttaccggacaaaaacgcccgcgccggtggggagcctcggccccggctggaaaatgcctgcggatatccgcttacagctgcgcgataacacactgatactcagtgataacggcggcagaagcctgtattttgagcacctgtttcccggtgaggacggttacagccgcagcgaatcactctggctggtgcgcggcggcgtggcgaaactggatgaaggtcaccggctggccgcactctggcaggcgctgccggaagaactccgcttaagtccgcatcgttatctggcgacaaacagtccgcaggggccgtggtggctgctcggctggtgtgagcgggtgccggaagcggatgaggtgctgcctgcgccgctgccgccgtaccgggtactgaccgggctggtggaccgcttcgggcgcacacagacgttccaccgcgaagccgccggtgaattcagcggcgaaatcaccgacgtgacggatggtgccgggcgtcacttccggctggtactgaccacgcaggcgcagcgggcagaagaagcccggcagcaggccatttccggcgggacggaaccgtccgcttttcctgataccctgccgggttacaccgaatatggccgggacaacggcatctgtctgccgtgtggctgacgcacgacccggaatacccggagaatttacctgccgcgccgctggtgcgctatggctggacgccacgcggcgaactggcggtggtgtatgaccgtagtggcaaacaggtgcgcagctttacttacgatgataaataccggggccggatggtggcgcaccgtcacacgggccggccggaaatccgttaccgttacgacagcgacgggcgggtgacagaacagcttaacccggcaggcttaagctacacgtatcagtatgagaaggaccgcatcaccatcaccgacagcctgaaccgccgtgaagtgctgcactgtcagcgccagtgatataagacggtaattcgccatttggattgtccgctccacccaacatgttgtttccttaaggttctcacaccagaaaggacatcaacatgctgagcagagaggacttttacatgataaagcaaatgcgccagcagggcgcgtacatcgtcgatattgcgactcagattggttgctctgaacggacggtcagacgctacctcaaataccctgaaccgccagccagaaagacccgccacaaaatggttaagctgaaaccgtttatggattacatcgacatgcgcctggcagagaatgtctggaatagcgaggttatcttcgcggagattaaggcaatgggttatacgggcggacgttccatgctgcgttactacatccagcccaaacgtaaaatgcgtccgtcaaaaagaacagttcgcttcgaaactcagcctggataccagctccagcatgactggggcgaagttgaggtggaggttgccgggcaacggtgcaaagttaactttgcggttaatacgctggggttctcccgcagcttccatgtcttcgccgcaccaaaacaggatgctgagcatacctacgaatcactggttcgcgccttccgctacttcggtggttgtgtgaaaacggtgctggttgataaccagaaggctgcggtgctgaagaataacaacgggaaagtcgtgttcaactccggattcctgttgctggctgaccactataacttcctgccacgggcatgccgtccacgcagggccagaacaaaaggtaaggttgagcggatggtgaaatacctcaaggagaacttcttcgtccggtaccgcaggttcgacagcttcactcatgtcaatcaacaactggagcaatggatagccgatgtggctgacaaacgggagcttcgccagttcaaagaaacgccggaacagcgcttcgcgctggagcaggaacatctgcagccgttaccggatacagacttcgataccagttacttcgatatccgccatgtgtcctgggacagctatatcgaggttggtggtaatcgttacagcgttcccgaagcgctgtgtggtcagccggtatcgatacgaatatcgctggatgacgagttgcggatctacagtaatgagaaactggtggcctcacatcgcctctgttcagcatcgtctggctggcagacagtgccggagcatcacgccccgctctggcagcaggtcagtcaggtggaacatcgaccactgagtgcctatgaggagctgttgtgatgcatgaactggaagtcctgctgagtcgcctgaaaatggagcatctgagttatcacgttgaaagcctgctggaacaggcagctaaaaaagagctgaactaccgggagttcctgtgcatggcgctacagcaggaatggaacggcaggcatcagcgcggtatggagtccaggctgaagcaggctcgtctgccgtgggtcaaaacgctggagcagttcgactttaccttccagccgggcatcgaccgtaaggttgtccgggaactggctggtctggcgttcgtggagcgcagcgaaaacgtgatcctgctgggccctcctggtgtcggaaaaactcatctggccatagctcttggcgtgaaagcggtggatgcgggacatcgggtactgtttatgccactggacagactgatcgcgacactgatgaaagcgaaacaggaaaaccggctggagcgtcagctacagcaactgagttatgcccgggtgttgatcctggatgaaataggctatctgccgatgaacagagaggaagccagtctgttcttccggctactgaaccgtcgatatgaaaaagcgagcatcatactgacgtcaaacaaagggttcgcagactggggagaaatgttcggagatcacgtactggcaacagcgatcctggatcggctgctacatcactcaaccacgctgaatatcaaaggagagagttaccggttaaaagagaaacgtaaagctggagtgctgaccaaaaacacaacgccaatcagtgatgatgaaatggtggaaagcggacagcatcagtaacgaaagtatttagcgggcatgaaaatggcaaataacggtcaaacatcgtggcgttgacagcacacgtagggtgaagccgggctgaagcgggtggtgaaaaaggaacacgcggacggcagcgtcacgcagagtcagtttgacgccgtgggcaggctcaggacacagacggatgccgcaggccggacaacagaatacagcccggatgtggtgacgggtctcatcacgcgcatcaccacgccggatggcagggcatcggcgttttactataaccaccacagccagttaacgtcagccaccgggcctgacgggctggaaatacgccgggaatatgatgaatggggcaacctgctgaatgaagagaacccgcatcagctgcagcagcttattcgtttgccggggcagcagtatgatgaggagtccggcctgtattataaccgccaccgctattatgacccgctgcaggggcggtatatcactcaggatccgattgggctgaaggggggatggaacctgtatacatatccgctgagcccggtgaatagcatggatccattaggattatatgaatttaaatcaaaaaatattgatgatattggaatatttgcattggcaatgtgtaatggagaatcaattaacgagaataaagaatatggtggactaatatgtaagaagcaaggtgaatatttccccatgaatccgataagttcaaatgataatgatagtgtagacttgcgaaatataaaatgccctgaaggttcagagagagtaggcgattatcacactcacggtttttactctgacgataaaggaaataaagtaacaaaagaaaatgatgtttatgatagtctaaatttttcaagcaaagatttaacgaattcttatatgaatggaatgggaaaaaaagaatacagtagttacttgggaacaccaaataacacctatctaaaatataatcccaaagctaaagggaatggagttacaattatcaggcaagggagtaattaaaatgaaggcaatacaatgttgttatttccttgctttagtctccagtcatttaatggctggagttatgggtgatgataatatatttttaagtaattcggattcagctgctttatattgtgtggctaaaatatttccagatggagaaaatattttaatatataaagtaaatataattaatgctagttcaaaaaaagatgttttttttatgaaagcccaacatcaacccacaatgacataatggggggcgggggaatgtcatatgcctatgaatatgatgtaaaatataatatatgtcatttgagaaaaaagagcagaatgaggtaaaaatctttggctgtgtattcagtctggtaatcatccaaggaaagcttatcagaagggtgatgactccaattagtagaacatatattttcgataaaagcaccgatgactttttcatgaagttctacagaacgcgagaaacagatggttctgcgggccagacgtttgattcgggttctcagggtcagattgttacgctcaatgtgctgagtaaaaatcttaccagtcagatgcttctccttcggtaactctctagcgtaactaccccattcgtcagtggtcaacatgccgatggtaaaagggtaagcagcgcccgcaattcacgacaggtttcgtcagtccgggggccaaaagtgtaggccagaacaccaccagttttcgtgttgtacacgtaccagagccagtgctgtcgcgctttactgccgacaaagctccattgctgactaagtttgcagatgagtgccacatcagcatgagcgaccggggatgacgttattcttcgtggcgagagttttttaaagttcggatgactgtattaatgccgattttcagcgtacgggcagtatcgcgaaccccggcaccgttgaaagtcatttcagcgatttggtctttaactcccggtttacggggctcgtaacagtaactgagctgaaatacccggtgacagtcacggccgcggaatcgctcatgtctttttgggttctgcccgtgacggtaaacctgaacggactggcaacgggggcaatgaaggttaactgtgaccatgaaacaaccttaaaagcgagtattatatccttaattcaactaattggaggcatcaccgtttaccggagcgacagcttgcggaaaggtcgtgcaactacaaagcaacaaacagactacggcgggaattatttttttcatcatccattaccacgaaaacagcggccactctttggcgactgtggtgagttgtggcgcgtcgaaaacggcttgtggtgaaactaccgtttcctcaagcggaatatttttgccgtagcgttctttgagcttagcctggaccagcgggttgctgagatcgaactctttcaacttctgctgctcgcccacgcgcattcccagcgcgttctggtaaaccttccacaccacttccgaacagtactggcgatcgtcgctccatgagaagctgaaatcatacggtttaccgagataacgttttgccgtttgcgccagtttttgctgttgttcaacactcagtccgccttcaacgcggcgaacaacgtatttgcccttttcaccatgggcgatccactgcttgagcggggtgtatttcaccgggccgaccgcttcaaaaacgtagggctttttgttgcgtatcaccagcataccggtgtggctataatcggaatgggtcgccagttggatcgctttactttgcgatgagcgagagatctgaaagatgatgtcgccggtttgtggctgccaggcaaaggcaggtacagaaaccagcaggctgaggatcagcagcctgtttttcatagttaaacgtccatgtataaaaagcggtgggtcgcagacaacgtgctcgttgtttatgccggatgcggcgtgaacgccttatccggcctacaagttcgtgcaaattcaataaattgcaatatgacgtaggcctgataagcgtagcgcatcaggcgattccactccgcgccgctcttttttgctttagtattcccacgtctccgggttaatccccatctcacgcatgatctcttttgccgcttccgggatttcgtcgctgcgctctttacgcagatcggcatcatccggcaaaggttgcccggtaaaggcatgcagaaacgcttcgcacagcagctcgctgttggtagcgtgacgcaggttgttcacctgacgacgcgtgcgttcatcggtgaggatttttaacaccttaagaggaatggaaaccgtaatctttttgacttgttcactcttcttgccgtgctcagcgtatgggctgatatattcgccgctccattcagccatgagatacttaatcctcttcgtcaataaattgagaccagaccacacaatttatgtgggtactgaccgtaaacccgcatagtttaccgtacaggcgttaccgtgacatcgtgtaatgcacctgtcggcgtgataatgcatataattttaacggctatttgggatttgctcaatctatacgcaaagaagtttagatgtccagatgtattgacgtccattaacacaatgtttactctggtgcctgacatttcaccgacaaagcccaggaaacttcatcacatgacgcgtaaacaggccaccatcgcagtgcgtagcgggttaaatgacgacgaacagtatggttgcgttgtccctcccatccatctttccagcacctataactttaccggatttaatgaaccgcgcgcgcatgattactcgcgtcgcggcaacccaacgcgcgatgtggttcagcgtgcgctggcagaactggaaggcggtgctggcgcagtacttactaataccggcatgtccgcgattcacctggtaacgaccgtctttttgaaacctggcgatctgctggttgcgccgcacgactgctacggcggtagctatcgcctgttcgacagtctggcgaaacgcggttgctatcgcgtgttgtttgttgatcaaggcgatgaacaggcattacgggcagcgctggcagaaaaacccaaactggtactggtagaaagcccaagtaatccattgttacgcgtcgtggatattgcgaaaatctgccatctggcaagggaagtcggggcggtgagcgtggtggataacaccttcttaagcccggcattacaaaatccgctggcattaggtgccgatctggtgttgcattcatgcacgaaatatctgaacggtcactctgacgtggtggctggcgtggtgattgctaaagacccggacgttgtcactgaacttgcctggtgggcaaacaatattggcgtgacgggcggcgcgtttgacagctatctgctgctacgcgggttgcgaacgctggtgccgcgtatggagctggcgcagcgcaacgcgcaggcgattgtgaaatatctgcaaacccagccgttggtgaaaaaactgtatcacccgtcgctgccggaaaatcaggggcatgaaattgccgcgcgtcagcaaaaaggctttggcgcaatgttgagttttgaactggatggcgatgagcagacgctgcgtcgtttcctgagcgggctgtcgttgtttacgctggcggaatcattagggggagtggaaagtttaatctctcacgccgcaaccatgacacatgcaggcatggcaccagaagcgcgtgctgccgtcgggatctccgagacgctgctgcgtatctccaccggtattgaagatggcgaagatttaattgccgacctggaaaatggcttccgggctgcaaacaaggggtaaaaatgagtgtgattgcgcaggcaggggcgaaaggtcgtcagctgcataaatttggtggcagtagtctggctgatgtgaagtgttatttgcgtgtcgcgggcattatggcggagtactctcagcctgacgatatgatggtggtttccgccgccggtagcaccactaaccagttgattaactggttgaaactaagccagaccgatcgtctctctgcgcatcaggttcaacaaacgctgcgtcgctatcagtgcgatctgattagcggtctgctacccgctgaagaagccgatagcctcattagcgcttttgtcagtgatctggaacgcctggcggcgctgctcgacagcggtattaacgacgcagtgtatgcggaagtggtgggccacggggaagtatggtcggcacgcctgatgtctgcggtacttaatcaacaagggctgccagcggcctggcttgatgcccgcgagtttttacgcgctgaacgcgccgcacaaccgcaggttgatgaagggctttcttacccgttgctgcaacagctactggtgcaacatccgggcaaacgtctggtggtgaccgggtttatcagccgtaacaacgccggtgaaacggtgctgctggggcgtaacggttccgactattccgcgacacaaatcggtgcgctggcgggtgtttctcgtgtaaccatctggagcgacgtcgccggggtatacagtgccgacccgcgtaaagtgaaagatgcctgtctgctgccgttgctgcgtctggatgaagccagcgaactggctcgtctggcggctcccgttcttcacgcccgtactttacagccggtttctggcagcgaaatcgacctgcaactgcgctgtagctacacgccggatcaaggttccacgcgcattgaacgcgtgctggcctccggtactggtgcgcgtattgtcaccagccacgatgatgtctgtttgattgagtttcaggtgcccgccagtcaggatttcaaactggcgcataaagagatcgaccaaatcctgaaacgcgcgcaggtacgcccgctggcggttggcgtacataacgatcgccagttgctgcaattttgctacacctcagaagtggccgacagtgcgctgaaaatcctcgacgaagcgggattacctggcgaactgcgcctgcgtcaggggctggcgctggtggcgatggtcggtgcaggcgtcacccgtaacccgctgcattgccaccgcttctggcagcaactgaaaggccagccggtcgaatttacctggcagtccgatgacggcatcagcctggtggcagtactgcgcaccggcccgaccgaaagcctgattcaggggctgcatcagtccgtcttccgcgcagaaaaacgcatcggcctggtattgttcggtaagggcaatatcggttcccgttggctggaactgttcgcccgtgagcagagcacgctttcggcacgtaccgactttgaatttgtgctggcaggcgtggtggacagccgccgcagtctgttgagctatgacgggctggacgccagccgcgcgttagccttcttcaacgatgaagcggttgagcaggatgaagagtcgttgttcctgtggatgcgcgcccatccgtatgatgatttagtggtgctggacgttaccgccagccagcagcttgctgatcagtatcttgatttcgccagccacggtttccacgtcatcagcgccaacaaactggcgggagccagcgacagcaataaatatcgccagatccacgacgccttcgaaaaaaccgggcgtcactggctgtacaatgccaccgtcggtgcgggcttaccgatcaaccacaccgtgcgcgatctgatcgacagcggcgatactattttgtcgatcagcgggatcttctccggcacgctctcctggttgttcctgcaattcgacggtagcgtgccgtttaccgagctggtggatcaggcgtggcagcagggcttaaccgaacctgacccgcgtgacgatctctctggcaaagacgtgatgcgcaagctggtgattctggcgcgtgaagcaggttacaacatcgaaccggatcaggtacgcgtggagtcgctggtgcctgcccattgcgaaggcggcagcatcgaccatttctttgaaaatggcgatgaacttaacgagcagatggtgcaacggctggaagcggcccgcgaaatggggctggtgctgcgctacgtggcgcgtttcgatgccaatggcaaagcgcgtgtgggcgtggaagcggtgcgtgaagaccatccgctggcatcactgctgccgtgcgataacgtctttgccatcgaaagccgctggtatcgcgataatccgctggtgatccgtgggcctggcgctgggcgcgacgtcaccgccggggcgattcagtcggatatcaaccggctggcacagttgttgtaatttcagaaatttaataatgcccggtactcatgttttcgggtttatggtttctaatgaaatatattgaattatcataggattaggccggattaagcgtttacgacgaatccggcaagaagcaataagtacatggttagtttatatttgcagtccggtttgctttgcataccggattttctttttcttaccatcctgaagttttttcatcttccctgatttttcctcaccatcattggtcatttttcggttgacgcccttcggcttttccttcatctttacatctggacgtctaaacggatagatgtgcacaacacaacatataactacaagcgattgatgaggtaaggtatgagcttttttcacgccagccagcgggatgccctgaatcagagcctggcagaagtccaggggcagattaacgtttcgttcgagtttttcccgccgcgtaccagtgaaatggagcagaccctgtggaactccatcgatcgccttagcagcctgaaaccgaagtttgtatcggtgacctatggcgcgaactccggcgagcgcgaccgtacgcacagcattattaaaggcattaaagatcgcactggtctggaagcggcaccgcatcttacttgcattgatgcgacgcccgacgagttgcgcaccattgcacgcgactactggaataacggtattcgtcatatcgtggcgctgcgtggcgatctgccgccgggaagtggtaagccagaaatgtatgcttctgacctggtgacgctattaaaagaagtggcagatttcgatatctccgtggcggcgtatccggaagttcacccggaagcaaaaagcgctcaggcggatttgcttaatctgaaacgcaaagtcgatgccggagccaaccgcgcgattactcagttcttcttcgatgtcgaaagctacctgcgttttcgtgaccgctgtgtatcggcgggcattgatgtggaaattattccgggaattttgccggtatctaactttaaacaggcgaagaaatttgccgatatgaccaacgtgcgtattccggcgtggatggcgcaaatgttcgacggcctggatgatgatgccgaaacccgcaaactggtgggcgcgaatattgccatggatatggtgaagattttaagccgtgaaggagtgaaagatttccacttctatacgcttaaccgcgctgaaatgagttacgcgatttgccatacgctgggtgttcgacctggtttataaatagtgtggcttttgtgaaaatcacacagtgatcacaaattttaaacagagcacaaaatgctgcctcgaaatgagggcgggaaaataaggttgtcagccttgttttctccctcattacttgaaggatatgaagctaaaacccttttttataaagcatttgtccgaattcggacataatcaaaaaagcttaattacgatcaatttgacctacatctctttaaccaacaatatgtaagatctcaactatcgcatccgtggattaattcaattataacttctctctaacgctgtgtatcgtaacggtaacactgtagaggggagcacattgatgagcacgtcagacgatatccataacacgacagccactggcaaatgcccgttccatcagggcggtcacgaccagagcgcgggggcgggcacaaccactcgcgactggtggccaaatcaactccgtgttgacctgttaaaccaacattctaatcgttctaacccgctgggtgaggactttgactaccgcaaagaattcagcaaattagattactacggcctgaaaaaagatctgaaagccctgctgacagaatctcagccgtggtggccagccgactggggcagctacgccggtctgtttattcgtatggcctggcacggcgcaggtacttaccgttcaatcgatggacgcggcggcgcgggtcgtggtcagcaacgttttgcaccgctgaactcctggccggataacgtaagcctcgataaagcgcgtcgcctgttgtggccaatcaaacagaaatatggtcagaaaatctcctgggccgacctgtttatcctcgcaggtaacgtggcgctggaaaactccggcttccgtaccttcggttttggtgccggtcgtgaagacgtctgggaaccggatctggatgttaactggggtgatgaaaaagcctggctgactcaccgtcatccggaagcgctggcgaaagcaccgctgggtgcaaccgagatgggcctgatttacgttaacccggaaggcccggatcacagcggcgaaccgctttctgcggcagcagctatccgcgcgaccttcggcaacatgggcatgaacgacgaagaaaccgtggcgctgattgcgggtggtcatacgctgggtaaaacccacggtgccggtccgacatcaaacgtaggtcctgatccagaagctgcaccgattgaagaacaaggtttaggctgggcgagcacttacggcagcggcgttggcgcagatgccattacctctggtctggaagttgtctggacccagacgccgacccagtggagcaactatttcttcgaaaacctgttcaaatatgagtgggtacagacccgcagtccggctggcgcaatccagttcgaagcggtagacgcaccggaaattatcccggatccattcgatccgtcgaagaaacgtaaaccgacgatgctggtgaccgacctgacgctgcgttttgatcctgagttcgagaagatctctcgtcgtttcctcaacgatccgcaggcgttcaacgaagcctttgcccgtgcctggttcaaactgacgcacagggatatggggccgaaatctcgctacatcgggccggaagtgccgaaagaagatctgatctggcaagatccgctgccgcagccgatctacaacccgaccgagcaggacattatcgatctgaaattcgcgattgcggattctggtctgtctgttagtgagcgggtatcggtggcctgggcatctgcttctaccttccgtggtggcgacaaacgcggtggtgccaacggtgcgcgtctggcattaatgccgcagcgcgactgggatgtgaacgccgcagccgttcgtgctctgcctgttctggagaaaatccagaaagagtctggtaaagcctcgctggcggatatcatcgtgctggctggtgtggttggtgttgagaaagccgcaagcgccgcaggtttgagcattcatgtaccgtttgcgccgggccgcgttgatgcgcgtcaggatcagactgacattgagatgttcgagctgctggagccaattgctgacggtttccgtaactatcgcgctcgtctggatgtttccaccaccgagtcactgctgatcgacaaagcccagcaactgaccctgaccgcgccggaaatgaccgcgctggtgggcgggatgcgcgtactgggtgccaacttcgatggcagcaaaaacggcgtcttcactgaccgcgttggcgtattgagcaatgacttcttcgtgaacttgctggatatgcgttacgagtggaaagcgaccgacgaatcgaaagagctgtttgaaggccgtgaccgcgaaaccggcgaagtgaaatacactgccagccgtgcggatctggtatttggttctaactctgtcctgcgtgcggtggctgaagtttacgccagcagcgatgctcacgagaagtttgttaaagacttcgtggcggcatgggtgaaagtgatgaacctcgaccgtttcgacctgctgtaatctgaccttcttcagcgactgcctttcaggcagtcgctgaagtttctttaccggcgtatagtgtccacaggaaaactacacactggatctctcatgtctgccgcaggaaagagcaacccactggcaatcagtggcctggttgtgctcacacttatctggagttatagctggattttcatgaagcaagtcaccagctacatcggtgccttcgactttaccgccttacgctgcattttcggcgctctcgttttattcatcgtccttttattacgtggtcgcggaatgcgcccgacaccgtttaaatacaccttagccattgccctgttacaaacctgcgggatggttggcctggcgcagtgggcgctggtcagcggcggagcggggaaggtggcgatcctaagctataccatgccgttctgggtggtgattttcgccgcgttgtttctcggtgaacgcctgcgacgtgggcaatatttcgcgatactgattgccgctttcggcttatttttggtgttgcagccgtggcaactcgatttctcttcgatgaaaagtgccatgctggcaatcctctccggcgtcagttggggggcgagcgcgattgttgctaaacgtctgtatgcccgtcatccgcgcgtggatttattgtcgttaacatcctggcagatgctctatgcggcgctggtgatgagtgtggtcgctttactggtgccgcaacgtgaaattgactggcagcccaccgtgttctgggcgctggcctacagtgcgattctggcgacggcactggcgtggagcttatggttgtttgtattgaaaaacttgcctgccagtattgccagcttaagcacactggccgttcccgtttgcggcgtactcttttcctggtggctgctcggcgagaatccgggggccgttgaaggtagcggtattgtgctgattgtgatggcactggcgctggtgagccgtaagaaaaaagaagccgttagtgtaaaaaggatctgaattttttcttcatgtggggcgatcgcttatttaacaaaataacgataatgccccaccatgcgccagctaaacagcacatcttcttcctgcgcacctgcgccaatgttatgtatcaccagcggcgtaccgtcgcgggcgaagccatctgaaaccaccccaatatgtgccagcccgttatctaatcgccaggagacaatatcgcccgcttgatagtcactggggttcttgctgatggggcgtgttttatcgtggtgggtaaaccaggtttccagattaggcacccgacggtgatcgatgttgctgtccgggcgctttaactgccatttttgcgggtactcggcaaaattcttcgccatatcttcgtgcaccagtttctgcaaatcgaccttctggctgcgcaatgcacggatcaccacatcggaacataccccgcgtttttgcgggacatcaccgccaggataggtaagctgcatatacgccggatcgtaaaatagcgtgctgccgatttgctgtctggcaccgtctgcgatggcaaggttggtattggcctggatttgtaccacggttggtggaacggcgggagattttaaggagtggctggtaaatgccgttagcaggctgagcagcgccagtgaagctttcatctggttcgtccgtgaaaataagagtcacagattcgaccttccgggataacgattgttctgtagagaaaatgtccagaagcggataaaaaactcctgaacaacgtgggagtttcagattactggcacagagtgccggatgcggcgtgaacgccttatctgtcctaaaaaacaagaaaattcaatatattgcagagattgcgtaggcctgataagcgtagcgcatcaggcaattttgcgttcaaactcccggacaagccgggagtttggagtaggttattcccactcttgcaggaaacgctgaccgtactggtcggctaccagcagagcggcgtaaacctgatctggcgtcgcgccgccaggcatgttgtggatggtttcacattctgcacatgccgcttcagccacaattcgcattttcgccgggacatcttctttaatatccagttgagcgagagttattggcaaacctaccgcatggctaagtgcagctacggtttcgatttcctcaaccggtgcgttttccagaaccagctgcgtcagcgtaccaaatgccactttttcaccgtgataatagtgatgcgcgtccgggatagcggtcaggccgttatgcactgcgtgcgccgcagccagaccaccactttcaaaaccaacaccgctcaaataggtgttcgcttcaatcacgcgctccagcgccggagtcactacatgctgttcggcagcaagcatcgctttttcgccttcttccagcagggtgttgtagcacagttcagccagtgccagcgcagcctgggtgcacttgccgcccgccatggtggtcgcgccgctacgagagcaggcacgcgcttcaaaccaggttgccagcgcatcgccgatacccgccgctaacagacgtgcaggtgcgccagcgacgattttggtgtcgacaatgaccatattcgggttatttggcaacagcagatagcggtcaaactcaccctcatcggtgtagataacagacaatgcgctgcacggtgcatcggtagaggcgatagtcggtgcgatcgctaccggaacacccatgaaatgtgccagtgctttggctgtatcgagggtttttccgccaccgataccgagaattgcgccacactgcgcagtctccgcgatgccacgcagacggtcgatctcattttgcgaacatccaccgccaaacggcgcaatttctactaccagtccagcatctttaaagcttttctcgacagtggattgagcaaaacctaaaacaaatttgtcacccaccactaaccagcgttctgccagcggcttcaggtattcgcccagacgattaatcacatcagcgccctggatgtatttacccggtgattgaataatgcggtccataattgctcctttagagatgagtagtgccaaatgcggcattccagtcgtgttcgaacttctctatagctgactctaccgcaggggtgttgagcatttgttgcgctacatctaagggcagggtgatggattcacatcctgccagtaaacagtccagcgcctgacgcggcgttttaaagctggctgccagcaccatgctttctggcgcgtgcatttctaacagcgcttgcagctcctgaaccgtacgaatgccgtctccgccctgggcatctacgcggttaacatacggagcaacgtattttgcccctgccagcgcggccagtaacccttgtgcagcactgtacactgcggtgccaagcgtagtaataccctcttttttcagtattttaattgctgccagaccttcggaagtcaccgggattttcaccacaatacccggaatagcgtcgcgcaggcgcttcgcttcttccaccatcccctgcgcgtcgcggctcatggtctgagcaaacagaatgccctcatcaccaatcgctttttgcagacgcggcagcacttcccatatggactccttgctggcagcgataatgctcgggttagttgtcaccccggcaatggggaatatgcgtgccagacgttcgacttctgcgacgttagcggtgtccagatacagttccatgatgtttccttttacagttccagttcatgttgcagcaggctggcgatagcgtcggcagaggcggcgttaaccagcgcgttacggaattcttcgtgcatgatgcggcgagcgaggcgcgagaaaatgcgcatgtgctgatcgcccgcagcgtgtttgttcagggttaacatgatgatgaattgcgcttcatcatcaccccagcgcaccggcgcttgcagacgcgcaacgctgatggtggattgctcaatgtgttctgatttgctgtgtggaatggcaaaactaaagcccagaccggtagagaaaacggcctcgcgcgcccacaagtcggcttccagtttacgcggatagcggcagcgccctgccagcagcaggttatcggtcatgcctttgagcacttcttctttgctgcgccagtcgctttccagtgtgatgcactcggcggtgaccagcggtgcgtcttgttgggtcatgcggaattgcgccagcaggtgctccacttccagcgaagtacggcaggccattgcctggttgagcaacttgcggcactcacggctatcaagttgcgccatccgcgctttcgccgccggaattgatggtgcgctcatgctgagttcatccagccctaagccgaccagcaacggcagcacggaacctttcgctcccagctcaccgcacagaccaatccatttaccctggcgatgcaccgcctgcacggcgtaatcgagcgcccgcaagaatgccggattcaggctgttgtagtgacgagtaaccttagcgttatcgcgatccactgccagcagatattgcgtcaggtcattactaccaatactaaagaaatcaatctcttcgcagcattgatcgatgatgaacatcaccgacggcacttccagcataatgccgagctggatcttctcatcaaacggaatgtgttcgttacgtagttgctgtttggcttctgccagtttttctttcacccataagatctcttccattgaggagatcatcgggatcatgattttcaggctgccgtgagcggaggcgcgcaggatcgagcgtagttgtgtggtaaataacgacgcgtattcttcataaatacgcacggcgcgataaccgaggaacgggtttgcctctgcgggaatgtttagataatcaacgggtttgtcgccgccaatgtccatagtgcgcacaataatgctgcgtccgttggcagactccagcgcctgacaaaaaatgttgtacagctcgctttcgcccggtgcactggtgcgatccatatagagcatttcagtgcggaacaaaccaacgccttccgcaccattgccgaatgcggcctgcgcttccacggagtgagcgatgttagcggcaatttcaatgcggataccgtcagcggtacgggcttgttgggtcagccagacacgctgttgctcacgcagggcgtcctgtacgcgggcttcttgctgataataacgagctacggcttctcctggctcaaccacaatcgccccggcgttgccgtcgatataaatcgtttgatgctgccacggagtgagggcatcaatatccacaccaaccagcgtcggaatgttgaacgaacgggcaaggatcaccgtatgtgaggtggtgccgccacttttcagcaacagacctttgaggtgatttttatccagttcgaggaactggctgggggtcagttcatcagccatacaaatggcggactgcgtcagtttgcccggtgccgggaagcgttgctcaccgtagatttgctggagtaactggaagcagacgtcgcgtacgtccagggcacgttcttgcaggtagctgctgctggaacgggcgaactcttcgcaaaagtgattcgcactggcgacaatcgcttcggcgcagcttaatccctcgctgacgcctgccagtaagtgctgacgtaaagatgtatcgccagccagggatcggtgagcttccagtatcgcgctggtagcaccgtcgctatccagcagacgaaactcaatgtttttcagtaccagcgtcaggccgttttccagtgtggattgctcggcgtcaacgtctttggctgcgggaagattactcagcgcattgagatctaaagaagagatcggcgtcagaatgccgcctgcactaccgctgcacacggtgcgggcgcggataatttgcggattcagattggtcagtgaaaccggcagtggttccagttcgtcagatttaacttccgccagcggcgcatcgcagtgggggaattcatcgcgcagccattggcttaaacgctggtgcgcttcctgttcgtcggccccggaaatcagtaactggcagttatcgcccgccagcgtatcggtgccaatcagcgcaagggcgcttttggcgttgcccttgcgatcagtgtgcaggttatgccactcaatttgtgatgaaaaagtattacacagcgtttcaacgtggcttgccggacgcgcatgtacgccgttaggtagctcacaaataaattccacaatcagggccattgcctctctcccggtacggttttctgtttacaggataagagcgcacggcaacggcctgccatgtgacaaatctgccaaaagctggacaaatgtaatgtaaccgtcaatttgcgacgcgtctcacaagacgccgttttgcggcatgcttccggtttatcgcaagttatgaggcggatcgcatttttgtactgatattacaaaagtccagtaaatggcctttttatccactgtttgctccgcctgcgattgcctattgtttcctccatcaaaaatatggacatgggctttcgcaagcccgggagcagcttatgaatgagttggtgcagatcctgaaaaatacccgtcagcatttaatgacgggcgtttcacacatgattcccttcgtggtatcgggcggtattttgctggcggtttccgtcatgttgtatggcaaaggcgcagtgccggatgccgtagccgatccaaatctgaaaaaactgtttgatatcggcgttgcgggcttgacgctgatggtgcctttcctcgccgcttacattggttattccattgcagaacgttctgcgctggctccatgcgctatcggtacctgggttggtaacagctttggtgcgggcttctttggtgcactgatcgccgggattatcggcggcatcgtggtgcattacctgaagaaaattccggtgcataaagttctgcgctcggtgatgcctatcttcattattcctatcgtcggcacactgattaccgcaggcatcatgatgtggggcttgggcgagcctgtaggggcgttgaccaacagcctgactcagtggcttcaggggatgcagcagggcagcattgttatgctggcggtgatcatgggtctgatgctggcgttcgatatgggcggtccggttaacaaagtggcctatgccttcatgctgatttgcgttgctcagggtgtttataccgtggtggccatcgctgccgtgggtatttgtatcccgccgctggggatggggctggcgacgctgattggtcgtaaaaatttctccgcagaagagcgcgaaaccggcaaagcggcactggtgatgggctgtgttggcgttactgaaggggcgattcctttcgccgctgccgatccgctgcgtgtcattccttccatcatggtcggttcagtttgtggtgcagtaactgcggcgctggtcggtgcgcagtgctatgcaggctggggtggtctgattgtgctgccggtggttgaaggcaagctgggttatatcgcagcagtggctgtcggagcagtggtgacggctgtttgtgtgaacgtgctgaaaagtctggcgcgtaaaaatgggtcttcgactgatgaaaaagaagacgacctggatttggattttgaaattaattaattgaggaacgagccatgacgaaaattattgcagtaaccgcatgtccttcaggtgttgcccatacctatatggcagcagaggcgctggaaagtgccgcgaaagcgaaaggctgggaagtgaaagtagaaacctaggggtcaattggtctggaaaatgaactgactgcggaagatgtggcgagcgctgatatggtgattctgaccaaagatatcggcatcaagtttgaagagcgttttgctggcaagaccatcgtgcgcgtcaacatcagcgatgcagtaaaacgtgctgacgccattatgagcaaaattgaagctcacctggcgcaaaccgcttaagttcttctcccgctcgcaagggcgggttcgctttcccacaggagttcctcatgacgaatcgtatctctcgcctcaaaactgcactgtttgccaatacccgtgaaatctcgctggagcgggcgctgctttataccgccagccatcggcaaaccgaaggcgaaccggtgatattgcgccgggcgaaagcaacagcgtatatccttgaacatgttgaaatttcgattcgtgatgaagaactgattgccggtaaccgcaccgtaaaaccgcgcgccgggattatgtcgccggaaatggacccttactggctgctgaaagagctggatcaattcccgacgcgtccgcaggaccgctttgctatcagcgaagaagataaacgtatctaccgtgaagagttgttcccgtactgggaaaaacgttcgatgaaagatttcatcaacgggcagatgacagatgaagtaaaagccgcgaccaacacgcagattttcagcatcaaccagacggataaaggccaggggcacattattattgattacccacgcctgttgaatcacggtctgggtgagctggtggcacagatgcagcaacattgtcagcaacagccggagaatcacttttatcaggccgcgttgttactgctggaagcctcgcagaaacacattttgcgttacgccgaactggcggaaacgatggcggcaaactgcacagatgcacagcgtcgcgaagaactgctgactattgcggagatctctcgccataacgccgaacataagccgcagacgttctggcaggcgtgccagttattctggtacatgaacatcattctgcaatacgaatccaacgccagttcgctgtctttagggcgcttcgaccagtatatgttgccgttctatcaggcatctttaacccagggcgaagatccggcgttcctgaaagaactgctcgaatctttatgggtgaaatgcaacgacatcgtgctgttgcgctccaccagcagcgcgcgttatttcgcaggtttcccgaccggctataccgcactgctcggcgggttaaccgagaacggacgtagcgcggtgaacgtgctttcgttcctttgccttgacgcctatcaaagcgtgcaattaccgcaaccgaacctcggcgtgcgcactaacgccttgatcgacacgccgttcctgatgaaaaccgccgaaaccattcgcctcggcaccggtattccgcaaatctttaacgatgaagtggtggtaccagcgttcctcaaccgtggcgtttcgctggaagatgcgcgcgactattccgtagtgggctgtgtggaattatctattcccggcagaacctacggcttgcatgacatcgcgatgtttaatctgctgaaagtgatggaaatctgcctgcatgaaaatgaaggcaatgctgcgctgacttatgaaggtttactggagcagatccgcgccaagatcagccactacatcaccctgatggttgagggcagcaatatttgtgatatcggccatcgcgactgggcacctgtaccgctgctctcgtcttttatcagcgattgtctggaaaaaggtcgcgatattaccgatggcggcgcgcgttataacttctccggcgtacaggggatcggtatcgccaacctgagcgattctctccatgcgttgaaagggatggtttttgagcaacagcgtttaagttttgacgaattgctgtcggtattaaaagccaactttgcaacgccagaaggcgaaaaagtccgtgctcgcttaattaaccgcttcgagaaatacggtaacgatatcgacgaggtggataacatcagcgccgaactgttacgccactactgcaaagaagtggaaaaataccagaacccgcgcgcggttacttcacgccgggatcgtataccgtttctgctcacgtcccgttgggatcggtggttggcgcgacgccagacggtcgttttgccggggaacaactggcagacggcggcttgtcacctatgctgggccaggacgcacaagggccaacagcggtactgaagtcagtcagtaagctcgataatacgctgctgtctaacggtacgttgctgaacgtgaaattcactccggcgaccctggaaggtgaagcgggattacgcaaactggccgacttcttacgggcgtttacccagcttaagttgcagcatattcagtttaacgtggtgaacgccgacacgttgcgggaagcgcaacagcgcccacaagattatgccgggctggtggtgcgcgttgccggatacagcgccttctttgtcgaactgtcgaaggagatccaggatgacatcatccgccggacagcgcatcagctgtaacgttgtggaaacgcgccgcgatgatgtggcgcgcattttcaacattcagcgttattcactgaatgacggcgagggcattcgtacggtggtcttttttaaaggctgtccgcatctttgcccgtggtgtgctaatccggagtcgatctccggcaaaatccagacggtacgcagagaggcgaaatgtctgcactgtgcgaaatgtttgcgtgatgcggatgaatgcccctccggggcgtttgaacggattggtcgcgatatcagccttgacgctctggaacgggaagtgatgaaagatgacattttctttcgcacgtccggcggcggcgtcacgctttctggcggcgaagtgttaatgcaggcggagtttgctacccgttttttacagcgactgcggctgtggggtgtgtcatgcgccattgaaactgccggagacgcgccagcaagcaagctgttaccgctggcgaaattgtgcgatgaagtgctgttcgatttaaaaattatggacgcgactcaggcgcgggatgtggtgaagatgaacctgccacgcgtgctggagaatctgcgtttgctggtgagtgagggtgtcaacgtgatcccgcgtttaccgttgatccctggtttcacgctcagcagggagaatatgcagcaggcgctggatgtactgatcccgctgaaaatcaggcagatccatctgttaccgtttcatcagtacggcgaaccgaaataccgcctgctggggaaaacatggtcgatgaaagaggtgcctgcgccgtcgtcagccgatgtgacaacgatgcgcgaaatggcagaacgggccggatttcaggttaccgtgggaggttaaaatggcatacctggtggcagtaaccgcctgcgtaagcggcgtggcgcatacttatatggcggcggaacggctggaaaagttgtgccagttagagaagtggggcgtcagcattgaaactcagggcgcgctgggaacggagaatcgtttagcggacgaggatatccgtcgggcggatgttgctctgttgattacggatatcgagcttgccggtgccgagcgatttgaacattgccgctatgtgcaatgcagcatctacgcattcctgcgtgagccgcagcgggtaatgagcgcggtgcgcaaagtgctttctgcgccgcagcaaacccatcttattctggagtagtcggtttttctgtcagttggctgtggtactgccggcgatattccgacggcgagcgttcggtgtttttacgaaacagacggcagaagtagttgctgtcgacaaagccgcaggcgtgcgccacttcttttaccttcaggtcatagcctttcaataacgtcttagcgtgctccagtcgcgtgtgattcaggtattcgttaaaaccaatggcccccgttttttgaaacaggtgcgagagatagtttggtgaaatatagaatgcctgtgcgacagattcgcgggtaagcgcggaggcatagcgttcgtcgatataatcgcgaatagcttcaaatagtgcctggctgcgtgaggcggtctggatttggctgccgagcaaatcgcggcagtggctaagcaggctggctacgataagccttgccgtttgctgctcctgcggctgcatttgcatttcattgagcgtttgtagcagaaaagaacctatacgtgggccgcgtcgggcgacgtgttgcttcgccagattttgatattgtttgccatcccattgcacgacgctgaagccgagttgctgtttgccaaacagcacgctaaaggtggtagcgggtgttttccattgtgggaaattccagccaccagcggcaacgtacagcacatcgccgggaactaacgttgctccagcgccggtatcaacaaactcaccttccagcacaatttccagccgtggaaaatcgacctgatacgcaagatcgggcaccgggccgttactgctggcaaagtaaatctggcgcagggacagcgggccgttgatcaggcgggagagcagatagctgacgtcgtgatacatgttattcccttaggtatgtagacgggaaaacagtaactggcattattaaaaaaggccacctgaaaagtgtggcctgaggggagttcgatgtaaacattgcggcagttgtattgccggatgtggcgtaaacgccttatccagcctaccgccgcgatctgtaggccggataagacgcgtcaagcgtcgcatccggcaaatagcgcctggctgataattactgattacctacctggtcgccatacggcagagtgtcgtaatcgatcagcgcgtttttcttgtacgggttaccaatccagcgggtagtttctttgaactgcggattcaccactgaacgggttggatcgtaaccgtcgtaagataagcccgccaaatctgaccaggtgtggatcagttccgccaggctgtatttacgatcgacatcctgtgagaaatcacggggatgagtcgcttgccatttttccgacgtccacagcaggaacggaatggtgtacatgtggcgcgtcgggttgtcttcgttacgcccctgagttttgtgcggcggcgtgtcgtaaacctcttcaccgtggtcagagaagtaaaccaggaatccgttcgggtctgccgctttaaagtctttaatcaggctggcaaccacatgatcgttatacaggttagcgttgtcataatcgttatatgattccagctcttctgcgcttaatcctggcggaacatgatcggtattgccatcaaacttgccctgattttccgggtagcggtatttgtatttgatatgcgtacccagcagatgaacgatgatcagtttcttcggcgcagggtcattcagcacatcctggaacggcttcagcacgttggtgtcgtattcacgcgcactctgcgtacgttgctggttcatgtagtactgcttgtcggtctggcgcgaaaataccgtcagcatggtattgcgggcggtcatcgtctgctggttggtgatccagaaggttttataacccgcctgtttcatcatgttcatcagcgacggctgcgtcagatacagatccgggttcttttcattggcaaaggtcagcgcctgttgcaggatttcaatggtgtacggacgagacgtaactacgttattaaacacggtcagattcggatcggttttatgcagcgcatccagctccggcgtggtttcacgcggataaccgtacagactcatgcgtccgcgctgggtcgactcgccaatcaccagcactaaagtgcgcggttcgttacccgattcatctttgaaattagccagtggcggcaaggcattattttcattcagtaactttgttagcgagtttagttgctgacgatactgataatagccggtcaggaattgccacggtgcggcaggctccatacgcgaggccaggttatccaacgttttctcaaacggcttgtttttgataaacgtattcatggcgatcggatgcagaatcaagccataaagcagggcaaaagagacaacataacgccacggctttggaatatagaccgggcgcaggcgtgtccacagcagaactgccaccgccgtataggccagcgcgataagcacaattttcaggctgaaatactggcttaaatactcgctggcttcgttggtgttggtttcgaacatcacaaacagaacgctctgcgagaactcctgcccgtagatgacgtagtagcatagcgccgccagagaggccgcccatagcaccacgccgattactgcggcaataattttaatccgcttcggaaagaggaataccgggatcaaccacagcgagctgaataacagcgagtcgcgaatgccgttggtgccactataaccactgatgtaaataatggcctgtagcagagtagagaaaaaccaaaagtagagcagtgcccaacccagggctttccagctaaaaaggggtttagcctggacttctgtggaatgcatagtaagaacctgtcttgaaaaaaatatcgccgaatgtaacgacaattccttaaggatatctgaaggtatattcagaatttgaataaaatgcagacagaaatatattgaaaacgagggtgttagaacagaagtatttcagaaaaccctcgcgcaaaagcacgagggtttgcagaagaggaagattagccggtattacgcatacctgccgcaatcccggcaatagtgaccattaacgcttgttcgacgcgaggatccggttcctggccttctttttctgcctggcgggagcggtgcagcaactcggcctgcaatacgttcagcgggtcggtgtaaatattccgtagctgaatagactctgcaatccacggcagatcggccatcagatgggaatcgttggcaatcgccagcaccactttgatgtcttcttcttgcaggttgcgtaactctttacctaacggccacagtgctttgtctaccagacgttgatcatagtattccgccaaccacaggtctgctttggcgaagaccatctccagcatgccgagacgcgtcgagaagaatggccaatcgcggcacatggcttccagctcgctctgtttgccatcttcgaccactttttgcagcgccgtacctgcacccagccaggcggggagcatcaggcggttttgcgtccaggcaaaaatccacggtatggcgcgcagcgactcgacgccgccggttgggcgacgtttcgccggacgtgaacccaacggcagtttgcccaattcttgttccggcgtagcggagcggaagtaaggcacaaaatctttgttttcacgtacgtagccacggtagagatcgcaggagatgactgacagttcatccataatgcgacgccagctctctttcggctcaggtggtggcagcaggttggcttccagaatcgccccggtgtaaagcgacaggctgctgacggtgatttctggcagaccatatttaaagcggatcatctcgccctgttcagtcacgcgcaggccacctttcaggcttcctggcggttgtgacagcagcgccgcatgggcaggtgcgccgccgcgaccaatggaaccgccgcgaccgtggaacaacgtcagctcaatacccgctttttcgcaggttttgattaatgcatcctgtgcctgatattgcgcccaggaagctgccatcacgcccgcatcttttgctgagtcggaatagccaatcatcaccatctgtttgccctgaatcaggccgcgataccagtcgatattgagcagctgggtcatgacatcgttggcgttgttcaggtcatcgagggtttcaaacagcggagcaaccggcatcgcaaacccgatacccgcttctttcagcagcaggtggacagccagtacgtcggacggcgttttcgccatcgagatcacgtaggcggcaatggagccttgcggcgcttcggcaatcacctggcaggtatcgagcacttcgcgcgtttcggcgcttggttgccagttgcgcggcagaagcggacgtttggagttcagttcgcggatcaggaacgcctgtttgtcggcctctgaccagctttcgtagtcgccgataccgaggtagcgggtcagctcgcccagcgcttcggtatggcgggtgctctcctgacggatatcaatacggaccagcggtacgccgaaacatttcacgcggcgcagggtgtcgagcagatcgccgttggcgataatacccatgccacacgcctgaagtgactggtagcaagcgtagagcggttcccacagttcttcgttttgtgtcagcagcccttctggttttggcagttcttcgcctttcaggcgcgcttccagccatgcctgtgtcgccatcaggcgagaacgcaggtttttcatcagatagcgatacggttctgcggcaccttcttcgccaaccagcgccagcagttcaggggtcgcttcaaccatcgacagttcagaaaccagaacctgaatatctttcaggaacagatcggtggctttccagcgactgagtagcaggacgtggcgggtgatatcggcagtgacgttcgggttgccgtcgcggtcaccgcccatccacgaagtaaaacggaccggaacaaattcgacgggcagtttgtagccgaggttctcttccagttgttcgttcagttcgcgcaagtaattcggtacgccttgccacaggctgttttctactacggcaaagccccatttggcttcatctaccgggcttggacgcagcttacggatttcatcagtatgccatgactgggcgattaactggcgcaggcgacgcatcagctggttgtgttcgtagtcagcgatatctttgttatcgagctgttttaagcaggcgttcacttccaccattttgtggatcagtgtacgacgggtaatttcggttgggtgagccgtgaggaccagttccagcgacagcgattccactgcttttttgatggtgtcttcgctcagttccggctggtttttcagtttgcgcagggtgcgggcgatcacttccgggttgctggcagcttcgcctttcggcgaaatgctgtggtattgctcggcggtgttggctaggttcaggaactgactaaacgcacgcgcaacgggcagcagctcgtcgttcgacaaattttgtaaggtggtgagcaactcctggcggttagcatcattgccagcgcgtgaagatttcgacaacttacggatagtttctacgcgttcaagaatgtgttctcccaacgcatccttgatggtttctcccagcactttgccgagcatactgacattactacgcaatgcggaatattgttcgttcatattaccccagacaccccatcttatcgtttgatagccctgtatccttcacgtcgcattggcgcgaatatgctcgggctttgcttttcgtcgtcttttataaagccacgtaaaagcggtgacgtcaaatgctgcgaaatcgcttcagcaaacgaataaatagcaggaatttacgccattaaattcacgacgctttaaataagcgtaacttatggaaatgttaaaaaatcgccatacataacaccaaaggtgtaggtcggataagatgcgcaagcatcgcatccgacattattgcggcaccggagtttggcaacggtgccggatgcggcgcgagcgccttatccggcctacgttttaatgccagcaaaaatggtgaattacctggataatcaactcacgggtgggtttaataaaccgcgtctccagatattcatcaggctgatgagcttgattgatggaacccggaccgagcaccagcgtcgggcataacgtttgaataaacggcgcttcggtacagtaattcaccacttcggtttttgctccgagcaatttctcaaccacttcaaccagttgatgattcggtgggcattcatagccagggatcggcggatgcagctcgtcgaccgtcagacgacccggccagcgttcgctcaccggagccaatgcatcgttgagcaaaccattaagttcattgagtgtcatgccaggcagcggacgaatatccatatgcaactcacagcaagcgcaaatacggttagaagcgtcgccaccgtgaatatgcccgaggttgagcgtagggtatggcacggtaaatgcttcgtagtgataacgttctttcaggttatcgcgcaattgcaaaatatgcccgatggcgtcgtgcattagttcgatagcgttaactccgcgtgctggatcgctggagtgccccgactggccctgaatacggatggcgttagagatatgacctttatgtgcgcgtaccggttgtagtgacgtcggttcgccaatgatggcgcaatccgggcgcagggcggtagtttcggcaaaataacgcgctccggccatactggtttcttcatcagcagtcgccagaatgtagagcggttttttcagtttcgtgacgtcgacatcgcgtagcgtatcaaggataaacgcaaaaaagcctttcatgtcggcggtgcctaagccgtaaagcttgccgtcatgctccgtcagtgtaaacggatcgcgcgtccagcgaccgtcatcaaatggcaccgtatcggtatgccccgccagcaacaagccgccagccccctgtccgatacttgccagcatattgaatttgttgcgagttcctggcacaggctgcacttccacattgaagcctaaatctttaaaccagtccgccagcagagtgattaaatctgcattgctttgatcgagtgcctcttccgtggcgcttattgaaggtgtggcaatcagagcacggtaaatctcgataaatggcggtaatttgtttttcattgttgacacacctctggtcatgatagtatcaatattcatgcagtatttatgaataaaaatacactaacgttgagcgtaataaaacccaccagccgtaaggtgaatgttttacgtttaacctggcaaccagacataagaaggtgaatagccccgatgttgaatacgctgattgtgggtgccagcggctacgctggcgcagagctagtgacctatgtaaatcgccatccgcatatgaacataaccgctttgactgtttcagcgcaaagcaatgatgcgggaaagttaatctccgatttgcatccgcagctaaaaggcatcgttgagctgccgttgcagccgatgtcggatatcagcgagtttagcccaggggtggacgtagtgtttctcgccaccgcccatgaagttagccacgatttagcgccgcagtttcttgaagcgggctgcgtggtgttcgacctttccggtgcgtttcgtgttaacgacgccaccttctatgaaaaatattacggctttacccatcaatacccggaactgctggaacaggcagcctacggtctggcggagtggtgcggtaataaattaaaagaagcgaatttgattgcggtgccaggctgttatccgacggcggcacagctggcgctgaaaccgttgattgatgccgatcttcttgacctcaatcagtggccggtgatcaacgccaccagcggcgtgagcggtgcaggacgtaaggcagcgatttcaaatagtttttgtgaagttagcctgcaaccgtatggcgtctttactcatcgccatcaaccagagatcgccacacacctcggtgctgacgttatcttcaccccacatctgggcaatttcccgcgcggcattctcgaaaccattacctgccgcctgaaatcgggtgtgacccaggcgcaagtcgcgcaagtgttacagcaggcgtatgcccataaaccgctggtgcggctgtatgacaaaggcgttccggcgctgaaaaatgtcgttgggctgccattttgcgatatcgggtttgccgttcagggcgagcatctgattattgtggcgaccgaagacaacttactgaaaggcgcggcggcacaagcggtacagtgcgccaatattcgtttcggctatgcggaaacgcagtctcttatttaagggtgcaatgatgaatccattaattatcaaactgggcggcgtactgctggatagtgaagaggcgctggaacgtctgtttagcacactggtgaattatcgtgagtcacatcagcgtccgctggtgattgtgcacggcggcggttgcgtggtggatgagctgatgaaagggctgaatctgccggtgaaaaagaaaaacggcctgcgggtgacgcctgctgatcagatagacattatcaccggagcactggcgggaacggcaaataaaaccctgttggcatgggcgaagaaacatcagattgcggccgtaggtttgtttctcggtgacggcgacagcgtcaaagtgacccagcttgatgaagagttaggtcatgttggactggcgcagccaggttcgcctaagcttatcaactccttgctggagaacggttatctgccggtggtcagctccattggcgtaacagacgaagggcaactgatgaacgtcaatgccgaccaggcggcaacggcgctggcggcaacgctgggcgcggatctgattttgctctccgacgtcagcggcattctcgacggcaaagggcaacgcattgccgaaatgaccgccgcgaaagcagaacaactgattgagcagggcattattactgacggcatgatagtgaaagtgaacgcggcgctggatgcggcccgcacgctgggccgtccggtagatatcgcctcctggcgtcatgcggagcagcttccggcactgtttaacggtatgccgatgggtacgcggattttagcttaagttttgttggccggaggcgcagctttccggcattgaatttcaaaataaggaaacagagttatggcactttggggcgggcgttttacccaggcagcagatcaacggttcaaacaattcaacgactcactgcgctttgattaccgtctggcggagcaggatattgttggctctgtggcctggtccaaagccctggtcacggtaggcgtgttaaccgcagaagagcaggcgcaactggaagaggcgctgaacgtgctgctggaagatgttcgcgccaggccacaacaaatccttgaaagcgacgccgaagatatccatagctgggtggaaggcaaactgatcgacaaagtgggccagttaggcaaaaagctgcataccgggcgtagtcgtaacgatcaggtagcgactgacctgaaactgtggtgcaaagataccgttagcgagttactgacggctaaccgacagctgcaatcggcgctggtggaaaccgcacaaaacaatcaggacgcggtcatgccaggttacactcacctgcaacgcgcccagccggtgacgttcgcgcactggtgcctggcctatgttgagatgctggcgcgtgatgaaagccgtttgcaggatgcgcttaagcgtctggatgtcagcccattaggctgtggcgcgctggcgggaacggcctatgaaatcgaccgtgaacagttagcaggctggctgggctttgcttcggcgacccgtaacagtctggacagcgtttctgaccgtgaccatgtgttggaactgctgtcggctgccgctatcggcatggtgcatctgtcgcgttttgctgaagatctgattttctttaacaccggcgaagcggggtttgtggagctttctgaccgcgtgacttccggttcatcattaatgccgcagaagaaaaacccggatgcgctggagctgattcgcggtaaatgcggtcgggtgcagggtgcgttaaccggcatgatgatgacgctgaaaggtttgccgctggcttacaacaaagatatgcaggaagacaaagaaggtctgttcgacgcgctcgatacctggctggactgcctgcatatggcggcgctggtgctggacggcattcaggtgaaacgtccacgttgccaggaagcggctcagcagggttacgccaacgccaccgaactggcggattacctggtggcgaaaggcgtacctttccgcgaggcgcaccatatcgtgggtgaagcggtggtggaagccattcgtcagggcaaaccgctggaagatctgccgctcgacgagttgcagaaattcagcccggtgattggcgaagatgtctatccgattttgtcgctgcaatcgtgcctcgacaagcgtgcggcaaaaggcggcgtctcaccgcagcaggtggcccaagcgattgcttttgcgcaggcgcggttggggtaagaacatttatatgtacaaatttgagcctggcttatcgccgggcttttttatggcaaaaaaaagcggatcctggagatccgcaaaagttcacgttggctttagttattcgagttgagaaactctcgaaacgggcagtgacttcaagggttaaaagaggtgccgctccgtttctgtgagcaattatcagtcagaatgcttgatagggataatcgttcattgctattctacctatcgccatgaactatcgtggcgatggaggatggataatgaatattcgtgatcttgagtacctggtggcattggctgaacaccgccattttcggcgtgcggcagattcctgccacgttagccagccgacgcttagcgggcaaattcgtaagctggaagatgagctgggcgtgatgttgctggagcggaccagccgtaaagtgttgttcacccaggcgggaatgctgctggtggatcaggcgcgtaccgtgctgcgtgaggtgaaagtccttaaagagatggcaagccagcagggcgagacgatgtccggaccgctgcatattggtttgattcccacggttggaccgtacctgctaccgcatattatcccgatgctgcaccagacctttccaaagctggaaatgtatctgcatgaagcacagacccaccagttactggcgcaactggacagtggcaaactcgattgcgtgatcctcgcgctggtgaaagagagcgaagcattcattgaagtgccgttgtttgatgagccaatgttgctggctatctatgaagatcacccgtgggcgaaccgcgaatgcgtaccgatggccgatctggcaggggaaaaactgctgatgctggaagatggtcactgtttgcgcgatcaggcaatgggtttctgttttgaagccggggcggatgaagatacacacttccgcgcgaccagcctggagacgctgcgcaacatggtggcggcaggtagcgggatcactttactgccagcgctggctgtgccgccggagcgcaaacgcgatggggttgtttatctgccgtgcattaagccggaaccacgccgcactattggcctggtttatcgtcctggctcaccgctgcgcagccgctatgagcagctggcagaggccatccgagcaagaatggatggctatttcgataaagtgttaaaacaggcggtttaaaccgtttaacgcagctacccgataggcttccgccatggtcgggtagttaaaggtggtgttgacgaagtactcaatagtgttgccgccacctttctgttccataatcgcctgaccgatatgaataatttcggcagcgcgctcgccaaagcagtgaatacccagaatctcttttgtttcccgatggaacaaaattttcagcgtgcccacgttcatgccgacgatttgtgcgcgtgccagatgtttaaactgggcgcggcccacttcatatggcactttcatcgcggtcagctgctgttcggttttgcccacagagctgatttccgggatggtgtaaatgccggtagggatatcttcaatcagatgcgcggtggcttcgccttttaccagcgcctgcgcggcaatgcgcccctggtcataggccgctgatgccaggctcggataaccaatcacgtcgcccaccgcgtaaacgtgcggctgtgcggtctgatacatgctgttgaccttcagctgtccgcgactgtcagtttccagcccaatgttctgtaacgccagcgaatcggtattaccggtacgaccgttggcatagagcaggcagtcagctttcagttttttacccgacttcagatgcatgatcacaccgtcgtcacagccttcgatcttctcgtactcttcgttgtgacgaatcactacgccactgttccagaagtgataggagagagaatctgacatctcttgatcgagaaatgccagcaggcgatcgcgggtgttgatcagatccacttttacatccataccgcggaagatcgacgcatattcacagccgatcactccagcaccatagataagtacatggcgcggttcgtggtgcatgctaagaattgagtcgctgtcgtaaatgcgtggatgggtgaaatcaacatctgttggatgatatggacgagagccgcaggcaataacaaatttttcagcggttagtgtttcgacgctgccgtccgggcaatccagcgccaacgtatgctcgtcaacaaagcgagcgttcccctgcaatatttcacagtgattacgttcgtaaaatccctgacgcatgcgcgtttgttgattaatcacgttatcggcatggttaaggatatcggcaaaagaagagcggagcagtcgcgaatggtcgctgtatagtgggttttgattgaattctataatgcggctgacggcgtgacggagagctttcgacgggatggtgccccagtgggtgcaaccgccgccaacattttgataacgctcgataactgcgacgcgcacaccttgcttaaccaggcccattgcagcgccttcgccgccggggccggaacctattactatggcatcgtaatcgtaggaatgtggcatggtagggcttacctgttcttatacataaaagcaacagaatggtaacattctatcgcgggtaagccaattgatccccgtcatttatctggctatatcctgagcggcctttgctttgtctgtttcttacttttgccctgacgttttattggatttttatcgacgatactctccgtttaagcggcaggtttccgctgtacgtaaaagaaccggccagtaaatatgttttattgcgttaccgttcattcacaatactggagcaatccagtatgttcattctctggtatagtgccagcagtacttttggcaaggattcagacatcgtgatgggcataagagcgcaacaaaaagaaaaaacccgccgttcgctggtggaagccgcatttagccaattaagtgctgaacgcagcttcgccagcctgagtttgcgtgaagtggcgcgtgaagcgggcattgctcccacctctttttatcggcatttccgcgacgtagacgaactgggtctgaccatggttgatgagagcggtttaatgctacgccaactcatgcgccaggcgcgtcagcgtatcgccaaaggcgggagtgtgatccgcacctcggtctccacatttatggagttcatcggtaataatcctaacgccttccggttattattgcgggaacgctccggcacctccgctgcgtttcgtgccgccgttgcgcgtgaaattcagcacttcattgcggaacttgcggactatctggaactcgaaaaccatatgccgcgtgcgtttactgaagcgcaagccgaagcaatggtgacaattgtcttcagtgcgggtgccgaggcgttggacgtcggcgtcgaacaacgtcggcaattagaagagcgactggtactgcaactgcgaatgatttcgaaaggggcttattactggtatcgccgtgaacaagagaaaaccgcaattattccgggaaatgtgaaggacgagtaatgaaacaagcaaatcaagatagaggtacgctgctgctggcgttagttgctggcttatcgattaatggtactttcgcagcgctgtttagctccattgtgccattttctgtattcccgattatttccctggtgctgacggtttactgcctgcatcaacgttatcttaatcgcactatgccggtaggcttgccgggtctggcagctgcctgttttattctcggcgtactgctgtacagcacggtagttcgtgcggaatatccggatatcggctctaacttcttcccggcagtactctccgtcattatggtgttctggattggcgcgaagatgcgtaaccgtaagcaggaagttgctgagtaatcggtattatgccggatgctggcgcatccggcatgggttttacttcgcggtcagtaatacgccgcactccatatggtgcgtgtaggggaactgatcaaacagagccagacgttcgaccttgtgcgtctggcttaatgtttccagattcttgcataacgtttccgggttacaggagatgtacaaaatacacggatacgcctgcaccattttctcggtttcactgtccagaccgctgcgcggtgggtcgacaaaaatggtttcgcactgataactctttaagtcgatcccttgcaggcggttaaactcgcgcacaccattcatcgcctgagtaaattcttctgccgccatacgaataatttgtacgttatcaatatggttagctgcgatgttgtattgcgcagcagcaaccgacggcttagcgatttcggtggctaatacccgatcaaaattgcgcgccagcgctaatgaaaagttaccgttgccgcagtacagctccagtaaatcgccttttgagcctttggttacgtccagcgcccattccagcatctgaatattcatcgccgcgttcggctgggtaaagctgttttctacctgacggtagatcatctctttccctgcgaccggcagacgctcgtcgatgtaatcttgatccagctcgattttggttttcgttgcccgaccaatcagatgcacattcagattctgcgcgcgcagtgcatcgcgcagggcctccgcttcctgacgccactcatcatccagcttcttatggtatagcagggaaaccaccgcctgattactcagcgtggtgaggtaatcaatctggaacaacttgtggcgcagaacgggattattacgcacacccgcaatcatcgccgtcatcaactggttgataagttcactggcggcggggaagctatccacgcggatacggcttttggtttgttgatcgaaaatgatgtgatacaggtcatcgccatcgtgccagatgcggaactccgcacgcatccggtaatgactgaccggcgagcgaaacacttccggaaccaggtcagaaaacggtgccatcatactttgcaaacgtaccactttttcggctaactgcgcttcatactgttctgttggaaggtgttcgggggtcatgatgtatcctgaaaaattaaagtacgcggcgattgtagggattgctcatcagatgtccagatcttgatgaattcctatttgtgagctacgtctggacagtaacttgttacaacctgtagcatccacttgtcggtcctgtgagttaatagggaatccagtgcgaatctggagctgacgcgcagcggtaaggaaaggtgcgatgattgcgttatgcggacactgccatccggtgggaagtcatcatctcttagtatcttagatacccctccaagcccgaagacctgccggccaacgtcgcatctggttctcatcatcgcgtaatattgatgaaacctgcggcatccttcttctattgtggatgctttacaatgattaaaaaagcttcgctgctgacggcgtgttctgtcacagccttttccgcttgggcacaggataccagcccggatactctcgtcgttactgctaaccgttttgaacagccgcgcagcactgtgcttgcaccaaccaccgttgtgacccgtcaggatatcgaccgctggcagtcgacctcggtcaatgatgtgctgcgccgtcttccgggcgtcgatatcacccaaaacggcggttcaggtcagctctcatctatttttattcgcggtacaaatgccagtcatgtgttggtgttaattgatggcgtacgcctgaatctggcgggggtgagtggttctgccgaccttagccagttccctattgcgcttgtccagcgtgttgaatatatccgtgggccgcgctccgctgtttatggttccgatgcaataggcggggtggtgaatatcatcacgacgcgcgatgaacccggaacggaaatttcagcagggtggggaagcaatagttatcagaactatgatgtctctacgcagcaacaactgggggataagacacgggtaacgctgttgggcgattatgcccatactcatggttatgatgttgttgcctatggtaatacaggaacgcaagcgcagacagataacgatggttttttaagtaaaacgctttatggcgcgctggagcataactttactgatgcctggagcggctttgtgcgcggctatggctatgataaccgtaccaattatgacgcgtattattctcccggttcaccgttgctcgatacccgtaaactctatagccaaagttgggacgccgggctgcgctataacggcgaactgattaaatcacaactcattaccagctatagccatagcaaagattacaactacgatccccattatggtcgttatgattcgtcggcgacgctcgatgagatgaagcaatacaccgtccagtgggcaaacaatgtcatcgttggtcacggtagtattggtgcgggtgtcgactggcagaaacagactacgacgccgggtacaggttatgttgaggatggatatgatcaacgtaataccggcatctatctgaccgggctgcaacaagtcggcgattttacctttgaaggcgcagcacgcagtgacgataactcacagtttggtcgtcatggaacctggcaaaccagcgccggttgggaattcatcgaaggttatcgcttcattgcttcctacgggacatcttataaggcaccaaatctggggcaactgtatggcttctacggaaatccgaatctggacccggagaaaagcaaacagtgggaaggcgcgtttgaaggcttaaccgctggggtgaactggcgtatttccggatatcgtaacgatgtcagtgacttgatcgattatgatgatcacaccctgaaatattacaacgaagggaaagcgcggattaagggcgtcgaggcgaccgccaattttgataccggaccactgacgcatactgtgagttatgattatgtcgatgcgcgcaatgcgattaccgacacgccgttgttacgccgtgctaaacagcaggtgaaataccagctcgactggcagttgtatgacttcgactggggtattacttatcagtatttaggcactcgctatgataaggattactcatcttatccttatcaaaccgttaaaatgggcggtgtgagcttgtgggatcttgcggttgcgtatccggtcacctctcacctgacagttcgtggtaaaatagccaacctgttcgacaaagattatgagacagtctatggctaccaaactgcaggacgggaatacaccttgtctggcagctacaccttctgaaccacgtcccaccgtgctggtgtttgactccggcgtcggtgggttgtcggtctatgacgagatccggcatctcttaccggatctccattacatttatgctttcgataacgtcgctttcccgtatggcgaaaaaagcgaagcgtttattgttgagcgagtggtggcaattgtcaccgcggtgcaagaacgttatccccttgcgctggctgtggtcgcttgcaacactgccagtaccgtttcacttcctgcattacgcgaaaagttcgacttcccggttgttggtgtcgtgccggcgattaaacctgctgcacgtctgacggcaaatggcattgtcggattactggcaacccgcggaacagttaaacgttcttatactcatgagctgatcgcgcgtttcgctaatgaatgccagatagaaatgctgggctcggcagagatggttgagttggctgaagcgaagctacatggcgaagatgtttctctggatgcactaaaacgtatcctacgcccgtggttaagaatgaaagagccgccagataccgttgtattgggttgcacccatttccctctactacaagaagaactgttacaagtgctgccagagggaacccggctggtggattctggcgcagcgattgctcgccgaacggcctggttgttagaacatgaagccccggatgcaaaatctgccgatgcgaatattgccttttgtatggcaatgacgccagaagctgaacaattattgcccgttttacagcgttacggcttcgaaacgctcgaaaaactggcagttttaggctgatttggttgaatgttgcgcggtcagaaaattattttaaatttcctcttgtcaggccggaataactccctataatgcgccaccactgacacggaacaacggcaaacacgccgccgggtcagcggggttctcctgagaatctcaacagagaaaagcaaaaaaaatgcttgactctgtagcgggaaagcgtattatgcacacctcgcgccgctgagaaaaagcgaagcggcactgctctttaacaatttatcagacaatctgtgtgggcactcgaagatacggattcttaacgtcgcaagacgaaaaatgaataccaagtctcaagagtgaacacgtaattcattacgaagtttaattctttgagcatcaaacttttaaattgaagagtttgatcatggctcagattgaacgctggcggcaggcctaacacatgcaagtcgaacggtaacaggaaacagcttgctgtttcgctgacgagtggcggacgggtgagtaatgtctgggaaactgcctgatggagggggataactactggaaacggtagctaataccgcataacgtcgcaagaccaaagagggggaccttcgggcctcttgccatcggatgtgcccagatgggattagctagtaggtggggtaacggctcacctaggcgacgatccctagctggtctgagaggatgaccagccacactggaactgagacacggtccagactcctacgggaggcagcagtggggaatattgcacaatgggcgcaagcctgatgcagccatgccgcgtgtatgaagaaggccttcgggttgtaaagtactttcagcggggaggaagggagtaaagttaatacctttgctcattgacgttacccgcagaagaagcaccggctaactccgtgccagcagccgcggtaatacggagggtgcaagcgttaatcggaattactgggcgtaaagcgcacgcaggcggtttgttaagtcagatgtgaaatccccgggctcaacctgggaactgcatctgatactggcaagcttgagtctcgtagaggggggtagaattccaggtgtagcggtgaaatgcgtagagatctggaggaatatcggtggcgaaggcggccccctggacgaagactgacgctcaggtgcgaaagcgtggggagcaaacaggattagataccctggtagtccacgccgtaaacgatgtcgacttggaggttgtgcccttgaggcgtggcttccggagctaacgcgttaagtcgaccgcctggggagtacggccgcaaggttaaaactcaaatgaattgacgggggcccgcacaagcggtggagcatgtggtttaattcgatgcaacgcgaagaaccttacctggtcttgacatccacggaagttttcagagatgagaatgtgccttcgggaaccgtgagacaggtgctgcatggctgtcgtcagctcgtgttgtgaaatgttgggttaagtcccgcaacgagcgcaacccttatcctttgttgccagcggtccggccgggaactcaaaggagactgccagtgataaactggaggaaggtggggatgacgtcaagtcatcatggcccttacgaccagggctacacacgtgctacaatggcgcatacaaagagaagcgacctcgcgagagcaagcggacctcataaagtgcgtcgtagtccggattggagtctgcaactcgactccatgaagtcggaatcgctagtaatcgtggatcagaatgccacggtgaatacgttcccgggccttgtacacaccgcccgtcacaccatgggagtgggttgcaaaagaagtaggtagcttaaccttcgggagggcgcttaccactttgtgattcatgactggggtgaagtcgtaacaaggtaaccgtaggggaacctgcggttggatcacatccttaccttaaagaagcgtactttgcagtgctcacacagattgtctgatagaaagtgaaaagcaaggcgtcttgcgaagcagactgatacgtccccttcgtctagaggcccaggacaccgccctttcacggcggtaacaggggttcgaatcccctaggggacgccacttgctggtttgtgagtgaaagtcacctgccttaatatctcaaaactcatcttcgggtgatgtttgagatatttgctctttaaaaatctggatcaagctgaaaattgaaacactgaacaacgaaagttgttcgtgagtctctcgaattttcgcaacacgatgatgaatcgaaagaaacatcttcgggttgtgaggttaagcgactaagcgtacacggtggatgccctggcagtcagaggcgatgaaggacgtgctaatctgcgataagcgtcggtaaggtgatatgaaccgttataaccggcgatttccgaatggggaaacccagtgtgtttcgacacactatcattaactgaatccataggttaatgaggcgaaccgggggaactgaaacatctaagtaccccgaggaaaagaaatcaaccgagattcccccagtagcggcgagcgaacggggaggagcccagagcctgaatcagtgtgtgtgttagtggaagcgtctggaaaggcgcgcgatacagggtgacagccccgtacacaaaaatacacatattgtgagctcgatgagtagggcgggacacgtggtatcctgtctgaatatggggggaccatcctccaaggctaaatactcctgactgaccgatagtgaaccagtaccgtgagggaaaggcgaaaagaaccccggcgaggggagtgaaaaagaacctgaaaccgtgtacgtacaagcagtgggagcacgcttaggcgtgtgactgcgtaccttttgtataatgggtcagcgacttatattctgtagcaaggttaaccgaataggggagccgaagggaaaccgagtcttaactgggcgttaagttgcagggtatagacccgaaacccggtgatctagccatgggcaggttgaaggttgggtaacactaactggaggaccgaaccgactaatgttgaaaaattagcggatgacttgtggctgggggtgaaaggccaatcaaaccgggagatagctggttctccccgaaagctatttaggtagcgcctcgtgaattcatctccgggggtagagcactgtttcggcaagggggtcatcccgacttaccaacccgatgcaaactgcgaataccggagaatgttatcacgggagacacacggcgggtgctaacgtccgtcgtgaagagggaaacaacccagaccgccagctaaggtcccaaagtcatggttaagtgggaaacgatgtgggaaggcccagacagccaggatgttggcttagaagcagccatcatttaaagaaagcgtaatagctcactggtcgagtcggcctgcgcggaagatgtaacggggctaaaccatgcaccgaagctgcggcagcgacgcttatgcgttgttgggtaggggagcgttctgtaagcctgcgaaggtgtgctgtgaggcatgctggaggtatcagaagtgcgaatgctgacataagtaacgataaagcgggtgaaaagcccgctcgccggaagaccaagggttcctgtccaacgttaatcggggcagggtgagtcgacccctaaggcgaggccgaaaggcgtagtcgatgggaaacaggttaatattcctgtacttggtgttactgcgaaggggggacggagaaggctatgttggccgggcgacggttgtcccggtttaagcgtgtaggctggttttccaggcaaatccggaaaatcaaggctgaggcgtgatgacgaggcactacggtgctgaagcaacaaatgccctgcttccaggaaaagcctctaagcatcaggtaacatcaaatcgtaccccaaaccgacacaggtggtcaggtagagaataccaaggcgcttgagagaactcgggtgaaggaactaggcaaaatggtgccgtaacttcgggagaaggcacgctgatatgtaggtgaagtcccttgcggatggagctgaaatcagtcgaagataccagctggctgcaactgtttattaaaaacacagcactgtgcaaacacgaaagtggacgtatacggtgtgacgcctgcccggtgccggaaggttaattgatggggtcagcgcaagcgaagctcttgatcgaagccccggtaaacggcggccgtaactataacggtcctaaggtagcgaaattccttgtcgggtaagttccgacctgcacgaatggcgtaatgatggccaggctgtctccacccgagactcagtgaaattgaactcgctgtgaagatgcagtgtacccgcggcaagacggaaagaccccgtgaacctttactatagcttgacactgaacattgagccttgatgtgtaggataggtgggaggctttgaagtgtggacgccagtctgcatggagccggccttgaaataccaccctttaatgtttgatgttctaacgtggacccgtgatccgggttgcggacagtgtctggtgggtagtttgactggggcggtctcctcctaaagagtaacggaggagcacgaaggttggctaatcctggtcggacatcaggaggttagtgcaatggcataagccagcttgactgcgagcgtgacggcgcgagcaggtgcgaaagcaggtcatagtgatccggtggttctgaatggaagggccatcgctcaacggataaaaggtactccggggataacaggctgataccgcccaagagttcatatcgacggcggtgtttggcacctcgatgtcggctcatcacatcctggggctgaagtaggtcccaagggtatggctgttcgccatttaaagtggtacgcgagctgggtttagaacgtcgtgagacagttcggtccctatctgccgtgggcgctggagaactgaggggggctgctcctagtacgagaggaccggagtggacgcatcactggtgttcgggttgtcatgccaatggcactgcccggtagctaaatgcggaagagataagtgctgaaagcatctaagcacgaaacttgccccgagatgagttctccctgaccctttaagggtcctgaaggaacgttgaagacgacgacgttgataggccgggtgtgtaagcgcagcgatgcgttgagctaaccggtactaatgaaccgtgaggcttaaccttacaacgccgaaggtgttttggcggatgagagaagattttcagcctgatacagattaaatcagaacgcagaagcggtctgataaaacagaatttgcctggcggccgtagcgcggtggtcccacctgaccccatgccgaactcagaagtgaaacgccgtagcgccgatggtagtgtggggtctccccatgcgagagtagggaactgccaggcatcaaattaagcagaaggccatcctgacggatggcctttttgcgtttctacaaactcttcctgtcgtcatatctacaagccatccccccacagatacggtaaactagccttgtttttgcatcaggaaagcagctatgaaccactccttaaaaccctggaacacatttggcattgatcataatgctcagcacattgtatgtgccgaagacgaacaacaattactcaatgcctggcagcatgcaaccgcagaaggacaacccgttcttattctgggtgaaggaagtaatgtactttttctggaagactatcgtggcacggtgatcatcaaccggatcaaaggtatcgaaattcatgatgaacctgatgcgtggtatttacatgtaggagccggagaaaactggcatcgcctggtaaaatacactttgcaggaaggtatgcctggtctggaaaatctggcattaattcctggttgtgtcggctcatcacctatccagaatattggtgcttatggcgtagaattacagcgagtttgcgcttatgttgattgtgttgaactggcgacaggcaagcaagtgcgcttaactgccaaagagtgccgttttggctatcgcgacagtatttttaaacatgaataccaggatcgcttcgccattgtagccgtaggtctgcgtctgccaaaagagtggcaacctgtactaacgtatggtgacttaactcgtctggatcctacaacagtaacgccacagcaagtatttaatgcggtgtgtcatatgcgcaccaccaaactccctgatccaaaagtgaatggcaatgccggtagtttcttcaaaaaccctgttgtatctgccgaaacggctaaagcattactggcgcaatttccaacagcaccaaattacccccaggcgggtggttcagtaaaactggcagcaggttggcttattgatcagtgccagctaaaagggatgcaaatgggtggggctgcggtgcaccgtcaacaggcgttagttctcattaatgaagacaatgcaaaaagcgaagatgtggtgcaactggcacaccatgtaagacaaaaagtgggtgaaaaatttaatgtctggcttgagcctgaagtccgctttattggtgcatcaggtgaagtgagcgcagtggagacaatttcatgaaggataacaccgtgccactgaaattgattgccctgttagcgaacggtgaatttcactctggcgagcagttgggtgaaacgctgggaatgagccgggcggctattaataaacacattcagacactgcgtgactggggcgttgatgtctttaccgttccgggtaaaggatacagcctgcctgagcccatccagttacttaatgctgaacagatattgggtcagctggatggcggtagtgtagccgtgctgccagttattgactccacgaatcagtaccttcttgatcgtatcggagagcttaaatcgggcgatgcctgtgttgcagaataccagcaggctggccgtggtcgccgggggcggaaatggttttcgccttttggcgcaaacttatatttgtcgatgttctggcgtctggaacaaggcccggcggcggcgattggtttaagtctggttatcggtatcgtgatggcggaagtattacgcaagctgggagcagataaagttcgtgtcaaatggcctaatgacctctatctgcaggatcgcaagctggcaggcattcttgtggagctgactggcaaaactggcgatgcggcgcaaatagtcattggagccgggatcaacatggcaatgcgccgtgttgaagagagtgtcgttaatcaggggtggatcacgctgcaggaagcggggatcaatctcgatcgtaatacgttggcggccatgctaatacgtgaattacgtgctgcgttggaactcttcgaacaagaaggattggcaccttatctgtcgcgctgggaaaagctggataattttattaatcgcccagtgaaacttatcattggtgataaagaaatatttggcatttcacgcggaatagacaaacagggggctttattacttgagcaggatggaataataaaaccctggatgggcggtgaaatatccctgcgtagtgcagaaaaataagaaaggggagtattcgctcccctgcaaattatttgcgtagtctgacctcttctaccgcatgattagcacttttcgtcaggattaaactggcgcgctcacgagtaggtagaatattttgctttaagttcagccagttgatctctttccacaatgtcatggcagtcttaatcgcttcttctttagttaatttcgcgtagttatgaaaataggaatccgggtcggtaaaagccccttcgcggaatttcagaaaacggttgatataccacgtctgaagtaagtcttccggtgcatcaacatatatcgaaaaatcgacaaaatcagaaacaaatacatgatgtggatcgtgtggataatccatcccgctctgtaagacatttaacccttcaagaattaaaatatcaggctgaacaacagttttatctccatccgggatcacatcataaataagatgcgagtaaacaggggctgtaacgtttggcacgccggacttgagatcggaaacaaacttcaccaggcgatgcatatcatacgattccgggaagcctttcttcttcatcagaccacgttctttcagaacctgattagggtgaaggaagccatctgtagtgatcagttcaacacgacgatgttccggccaacggcttaatagcgcctgcaatacacgggcggttgtacttttccccaccgcgacactgccagcaatactgataatgtaaggaatgcgttgcccgttggtaccaagaaactgttccagaactgcctgacggcgcagattcgagcttatatagaagttcagcaaacgtgacaaaggtaaatagatctcggcaacttcttctaacgagagatcttcattaatacctttgagacgggcgatctcatcttccgataacgtcataggtacggaatcacgcagagctgcccactggttgcggtcaaactgtaggtaaggcgtcattaacgtttgctcttttatactcataagcatgtttctggcggtcatagctctatcggcaaagcgatatttgccatggcgcgtcacagttctgttgaatgggttaatgggcaggagggtaacaccagatggggaggaataataagaaaaaatctctgccaggaagctatcgttgaaaagcaatgtgacagatattccatctgataaaaagaattatggtttagcaggagcgcattgttgagcacaatgatgttgaaaaagtgtgctaatctgccctccgttcggctgtttcttcatcgtgtcgcataaaatgtgaccaataaaacaaattatgcaattttttagttgcatgaactcgcatgtctccatagaatgcgcgctacttgatgccgacttagctcagtaggtagagcaactgacttgtaatcagtaggtcaccagttcgattccggtagtcggcaccatcaagtccggtggggttcccgagcggccaaagggagcagactgtaaatctgccgtcacagacttcgaaggttcgaatccttcccccaccaccaatttcggccacgcgatggcgtagcccgagacgataagttcgcttaccggctcgaataaagagagcttctctcgatattcagtgcagaatgaaaatcaggtagccgagttccaggatgcgggcatcgtataatggctattacctcagccttccaagctgatgatgcgggttcgattcccgctgcccgctccaagatgtgctgatatagctcagttggtagagcgcacccttggtaagggtgaggtcggcagttcgaatctgcctatcagcaccacttcttttctcctccctgttttttccttctgtttattgcattcaacaagtcgggcatgttgcctggttgatgtggtgatatcaccgatttatccgtgtcttagagggacaatcgatgtctaaagaaaagtttgaacgtacaaaaccgcacgttaacgtcggtactatcggccacgttgaccatggtaaaacaacgctgaccgctgcaatcactaccgtactggctaaaacctacggcggtgctgctcgcgcattcgaccagatcgataacgcgccggaagaaaaagctcgtggtatcaccatcaacacttctcacgttgaatacgacactccgacccgtcactacgcacacgtagactgcccggggcacgccgactatgttaaaaacatgatcaccggtgctgctcagatggacggcgcgatcctggtagttgctgcgactgacggcccgatgccgcagactcgtgagcacatcctgctgggtcgtcaggtaggcgttccgtacatcatcgtgttcctgaacaaatgcgacatggttgatgacgaagagctgctggaactggttgaaatggaagttcgtgaacttctgtctcagtacgacttcccgggcgacgacactccgatcgttcgtggttctgctctgaaagcgctggaaggcgacgcagagtgggaagcgaaaatcctggaactggctggcttcctggattcttacattccggaaccagagcgtgcgattgacaagccgttcctgctgccgatcgaagacgtattctccatctccggtcgtggtaccgttgttaccggtcgtgtagaacgcggtatcatcaaagttggtgaagaagttgaaatcgttggtatcaaagagactcagaagtctacctgtactggcgttgaaatgttccgcaaactgctggacgaaggccgtgctggtgagaacgtaggtgttctgctgcgtggtatcaaacgtgaagaaatcgaacgtggtcaggtactggctaagccgggcaccatcaagccgcacaccaagttcgaatctgaagtgtacattctgtccaaagatgaaggcggtcgtcatactccgttcttcaaaggctaccgtccgcagttctacttccgtactactgacgtgactggtaccatcgaactgccggaaggcgtagagatggtaatgccgggcgacaacatcaaaatggttgttaccctgatccacccgatcgcgatggacgacggtctgcgtttcgcaatccgtgaaggcggccgtaccgttggcgcgggcgttgtagcaaaagttctgagctaattgccgataacatttgacgcaatgcgcactaaaagggcatcatttgatgccctttttgcacgctttcgtaccagaacctggctcatcagtgattttctttgtcataatcattgctgagacaggctctgttgagggcgtataatccgaaaagctaatacgcgtttcgatttggtttgcctcgcgatcgcggggtgaaaatgtttgtagaaaacttctgacaggttggtttatgagtgcgaataccgaagctcaaggaagcgggcgcggcctggaagcgatgaagtgggtcgttgtggtggcattgctcctggtggcgattgtcggcaactacctttatcgcgacattatgctgccgctgcgtgcgctggccgtagtaattctgattgctgcagcgggtggtgtcgcgctgttaacgacaaaaggtaaagctaccgttgcttttgcccgtgaagcgcgtaccgaagtccgtaaggtcatttggccgactcgccaggaaacattgcacaccacgctgattgtggctgcggttaccgcagtaatgtcactgatcctgtggggactggatggtattctggttcgcctggtatcctttatcactggcctgaggttctgagatgtctgaagctcctaaaaagcgctggtacgtcgttcaggcgttttccggttttgaaggccgcgtagcaacgtcgctacgtgagcatatcaaattacacaacatggaagatttgtttggtgaagtcatggtaccaaccgaagaagtggttgaaatccgtggcggtcagcgtcgcaaaagcgaacgtaaattcttccctggctacgtcctcgttcagatggtgatgaacgacgcgagctggcacctggtgcgcagcgtaccgcgtgtgatgggcttcatcggcggtacttccgatcgtcctgcgccaatcagcgataaagaagtcgatgcgattatgaaccgcctgcagcaggttggtgataagccgcgtccgaaaacgctgtttgaaccgggtgaaatggtccgtgttaatgatggtccgttcgctgacttcaacggtgttgttgaagaagtggattacgagaaatctcgtctgaaagtgtctgtttctatcttcggtcgtgcgaccccggtagagctggacttcagccaggttgaaaaagcctaacccagcgatcaaaaaagcggcgatttaatcgttgcacaaggcgtgagattggaatacaatttcgcgccttttgtttttatgggccttgcccgtaaaacgattttttatatcacggggagcctctcagaggcgttattacccaacttgaggaatttataatggctaagaaagtacaagcctatgtcaagctgcaggttgcagctggtatggctaacccgagtccgccagtaggtccggctctgggtcagcagggcgtaaacatcatggaattctgcaaagcgttcaacgcaaaaactgattccatcgaaaaaggtctgccgattccggtagtaatcaccgtttacgctgaccgttctttcactttcgttaccaagactccgccggcagcagttctgctgaaaaaagcggctggtatcaagtctggttccggtaagccgaacaaagacaaagtgggtaaaatttcccgcgctcagctgcaggaaatcgcgcagaccaaagctgccgacatgactggtgccgacattgaagcgatgactcgctccatcgaaggtactgcacgttccatgggcctggtagtggaggactaagaaatggctaaactgaccaagcgcatgcgtgttatccgcgagaaagttgatgcaaccaaacagtacgacatcaacgaagctatcgcactgctgaaagagctggcgactgctaaattcgtagaaagcgtggacgtagctgttaacctcggcatcgacgctcgtaaatctgaccagaacgtacgtggtgcaactgtactgccgcacggtactggccgttccgttcgcgtagccgtatttacccaaggtgcaaacgctgaagctgctaaagctgcaggcgcagaactggtaggtatggaagatctggctgaccagatcaagaaaggcgaaatgaactttgacgttgttattgcttctccggatgcaatgcgcgttgttggccagctgggccaggttctgggtccgcgcggcctgatgccaaacccgaaagtgggtactgtaacgccgaacgttgctgaagcggttaaaaacgctaaagctggccaggttcgttaccgtaacgacaaaaacggcatcatccacaccaccatcggtaaagtggactttgacgctgacaaactgaaagaaaacctggaagctctgctggttgcgctgaaaaaagcaaaaccgactcaggcgaaaggcgtgtacatcaagaaagttagcatctccaccaccatgggtgcaggtgttgcagttgaccaggctggcctgagcgcttctgtaaactaatgcctttacgtgggcggtgattttgtctacaatcttacccccacatataatgcttaatgcagacgtatatccgagatattcgggttgtggcaaggcggcaactgagtgagtcgccaggagcatagctaactatgtgactggtgcgaatgaaggaagccaacgccgccacaagttgaatagcgacggatagaaaagatttgttcgttggagcctggcctatccaggcctccgtcgaagaccgcaggagtttcgcaagaaacttaatcccctgcgtagacggtgacagaacgctaagattattcttttatattctggcttgtttctgctcaccgtaattaagacgctctctccgcttggaggagtgaagtgagttccagagattttctctggcaaacatccaggagcaaagctaatggctttaaatcttcaagacaaacaagcgattgttgctgaagtcagcgaagtagccaaaggcgcgctgtctgcagtagttgcggattcccgtggcgtaactgtagataaaatgactgaactgcgtaaagcaggtcgcgaagctggcgtatacatgcgtgttgttcgtaacaccctgctgcgccgtgctgttgaaggtactccgttcgagtgcctgaaagacgcgtttgttggtccgaccctgattgcatactctatggaacacccgggcgctgctgctcgtctgttcaaagagttcgcgaaagcgaatgcaaaatttgaggtcaaagccgctgcctttgaaggtgagctgatcccggcgtctcagatcgaccgcctggcaactctgccgacctacgaagaagcaattgcacgcctgatggcaaccatgaaagaagcttcggctggtaaactggttcgtactctggctgctgtacgcgatgcgaaagaagctgcttaatcgcagttatctttttaacgcattcgcttacgtataaacttattctgatattcaggaacaatttaaatgtctatcactaaagatcaaatcattgaagcagttgcagctatgtctgtaatggacgttgtagaactgatctctgcaatggaagaaaaattcggtgtttccgctgctgctgctgtagctgtagctgctggcccggttgaagctgctgaagaaaaaactgaattcgacgtaattctgaaagctgctggcgctaacaaagttgctgttatcaaagcagtacgtggcgcaactggcctgggtctgaaagaagctaaagacctggtagaatctgcaccggctgctctgaaagaaggcgtgagcaaagacgacgcagaagcactgaaaaaatccctggaagaagctggcgctgaagttgaagttaaataagccaacccttccggttgcagcctgagaaatcaggctgatggctggtgactttttggtcaccagcctttttgcgctgtaaggcgccagtagcgtttcacactgtttgactactgctgtgcctttcaatgcttgtttctatcgacgacttaatatactgcgacaggacgtccgttctgtgtaaatcgcaatgaaatggtttaagcgtgatagcaacaggcattgcggaaagtgttccattttccggtcaacaaaatagtgttgcacaaactgtccgctcaatggacagatgggtcgacttgtcagcgagctgaggaaccctatggtttactcctataccgagaaaaaacgtattcgtaaggattttggtaaacgtccacaagttctggatgtaccttatctcctttctatccagcttgactcgtttcagaaatttatcgagcaagatcctgaagggcagtatggtctggaagctgctttccgttccgtattcccgattcagagctacagcggtaattccgagctgcaatacgtcagctaccgccttggcgaaccggtgtttgacgtccaggaatgtcaaatccgtggcgtgacctattccgcaccgctgcgcgttaaactgcgtctggtgatctatgagcgcgaagcgccggaaggcaccgtaaaagacattaaagaacaagaagtctacatgggcgaaattccgctcatgacagacaacggtacctttgttatcaacggtactgagcgtgttatcgtttcccagctgcaccgtagtccgggcgtcttctttgactccgacaaaggtaaaacccactcttcgggtaaagtgctgtataacgcgcgcatcatcccttaccgtggttcctggctggacttcgaattcgatccgaaggacaacctgttcgtacgtatcgaccgtcgccgtaaactgcctgcgaccatcattctgcgcgccctgaactacaccacagagcagatcctcgacctgttctttgaaaaagttatctttgaaatccgtgataacaagctgcagatggagctggtgccggaacgcctgcgtggtgaaactgcatctttcgacatcgaagctaacggtaaagtgtacgtagaaaaaggccgccgtatcactgcgcgccacattcgccagctggaaaaagacgacgtcaaactgatcgaagtcccggttgagtacatcgcaggtaaagtggttgctaaagactatattgatgagtctaccggcgagctgatctgcgcagcgaacatggagctgagcctggatctgttggctaagctgagccagtctggtcacaagcgtattgaaacgctgttcaccaacgacctggatcacggcccgtatatctctgaaaccttacgtgtcgacccaactaacgaccgtctgagcgcactggtagaaatctaccgcatgatgcgccctggcgagccgccgactcgtgaagcagctgaaagcctgttcgagaacctgttcttctccgaagaccgttatgacctgtctgcggttggtcgtatgaagttcaaccgttctctgctgcgcgaagaaatcgaaggttccggtatcctgagcaaagacgacatcattgatgttatgaaaaagctcatcgatatccgtaacggtaaaggcgaagtcgatgatatcgaccacctcggcaaccgtcgtatccgttctgttggcgaaatggcggaaaaccagttccgcgttggcctggtacgtgtagagcgtgcggtgaaagagcgtctgtctctgggcgatctggataccctgatgcctcaggacatgatcaacgccaagccgatttccgcagcagtgaaagagttcttcggttccagccagctgtctcagtttatggaccagaacaacccgctgtctgagattacgcacaaacgtcgtatctccgcactcggcccgggtggtctgacccgtgaacgtgcaggcttcgaagttcgagacgtacacccgactcattacggtcgcgtatgtccaatcgaaacccctgaaggtccgaacatcggtctgatcaactctttgtccgtgtacgcacagactaacgaatacggcttccttgagactccgtatcgtaaggtgaccgacggtgttgtaactgacgaaattcactacctttctgctatcgaagaaggcaactacgttatcgcccaggcgaactccaacctggatgaagaaggccacttcgtagaagacctggtaacttgccgtagcaaaggcgaatccagcttgttcagccgtgaccaggttgactacatggacgtatccacccagcaggtggtatccgtcggtgcgtccctgatcccgttcctggaacacgatgacgccaaccgtgcattgatgggtgcgaacatgcaacgtcaggccgttccgactctgcgcgctgataagccgctggttggtactggtatggaacgtgctgttgccgttgactccggtgtaactgcggtagctaaacgtggtggtgtcgttcagtacgtggatgcttcccgtatcgttatcaaagttaacgaagacgagatgtatccgggtgaagcaggtatcgacatctacaacctgaccaaatacacccgttctaaccagaacacctgtatcaaccagatgccgtgtgtgtctctgggtgaaccggttgaacgtggcgacgtgctggcagacggtccgtccaccgacctcggtgaactggcgcttggtcagaacatgcgcgtagcgttcatgccgtggaatggttacaacttcgaagactccatcctcgtatccgagcgtgttgttcaggaagaccgtttcaccaccatccacattcaggaactggcgtgtgtgtcccgtgacaccaagctggggccggaagagatcaccgctgacatcccgaacgtgggtgaagctgcgctctccaaactggatgaatccggtatcgtttacattggtgcggaagtgaccggtggcgacattctggttggtaaggtaacgccgaaaggtgaaactcagctgaccccagaagaaaaactgctgcgtgcgatcttcggtgagaaagcctctgacgttaaagactcttctctgcgcgtaccaaacggtgtatccggtacggttatcgacgttcaggtctttactcgcgatggcgtagaaaaagacaaacgtgcgctggaaatcgaagaaatgcagctcaaacaggcgaagaaagacctgtctgaagaactgcagatcctcgaagcgggtttgttcagccgtatccgtgctgtgctggtagccggtggcgttgaagctgagaagctcgacaaactgccgcgcgatcgctggctggagctgggcctgaccgacgaagagaaacaaaatcagctggaacagctggctgagcagtatgacgaactgaaacacgagttcgagaagaaactcgaagcgaaacgccgcaaaatcacccagggcgacgatctggcaccgggcgtgctgaagattgttaaggtgtatctggcggttaaacgccgtatccagcctggtgacaagatggcaggtcgtcacggtaacaagggtgtaatttctaagatcaacccgatcgaagatatgccttacgatgaaaacggtacgccggtagacatcgtactgaacccgctgggcgtaccgtctcgtatgaacatcggtcagatcctcgaaacccacctgggtatggctgcgaaaggtatcggcgacaagatcaacgccatgctgaaacagcagcaagaagtcgcgaaactgcgcgaattcatccagcgtgcgtacgatctgggcgctgacgttcgtcagaaagttgacctgagtaccttcagcgatgaagaagttatgcgtctggctgaaaacctgcgcaaaggtatgccaatcgcaacgccggtgttcgacggtgcgaaagaagcagaaattaaagagctgctgaaacttggcgacctgccgacttccggtcagatccgcctgtacgatggtcgcactggtgaacagttcgagcgtccggtaaccgttggttacatgtacatgctgaaactgaaccacctggtcgacgacaagatgcacgcgcgttccaccggttcttacagcctggttactcagcagccgctgggtggtaaggcacagttcggtggtcagcgtttcggggagatggaagtgtgggcgctggaagcatacggcgcagcatacaccctgcaggaaatgctcaccgttaagtctgatgacgtgaacggtcgtaccaagatgtataaaaacatcgtggacggcaaccatcagatggagccgggcatgccagaatccttcaacgtattgttgaaagagattcgttcgctgggtatcaacatcgaactggaagacgagtaattctcgctcaaacaggtcactgctgtcggggtaaaacccggcagcggattgtgctaactccgacgggagcaaatccgtgaaagatttattaaagtttctgaaagcgcagactaaaaccgaagagtttgatgcgatcaaaattgctctggcttcgccagacatgatccgttcatggtctttcggtgaagttaaaaagccggaaaccatcaactaccgtacgttcaaaccagaacgtgacggccttttctgcgcccgtatctttgggccggtaaaagattacgagtgcctgtgcggtaagtacaagcgcctgaaacaccgtggcgtcatctgtgagaagtgcggcgttgaagtgacccagactaaagtacgccgtgagcgtatgggccacatcgaactggcttccccgactgcgcacatctggttcctgaaatcgctgccgtcccgtatcggtctgctgctcgatatgccgctgcgcgatatcgaacgcgtactgtactttgaatcctatgtggttatcgaaggcggtatgaccaacctggaacgtcagcagatcctgactgaagagcagtatctggacgcgctggaagagttcggtgacgaattcgacgcgaagatgggtgcggaagcaatccaggctctgctgaagagcatggatctggagcaagagtgcgaacagctgcgtgaagagctgaacgaaaccaactccgaaaccaagcgtaaaaagctgaccaagcgtatcaaactgctggaagcgttcgttcagtctggtaacaaaccagagtggatgatcctgaccgttctgccggtactgccgccagatctgcgtccactggttccgctggatggtggtcgtttcgcgacttctgacctgaacgatctgtatcgtcgcgtcattaaccgtaacaaccgtctgaaacgtctgctggatctggctgcgccggacatcatcgtacgtaacgaaaaacgtatgctgcaggaagcggtagacgccctgctggataacggtcgtcgcggtcgtgcgatcaccggttctaacaagcgtcctctgaaatctttggccgacatgatcaaaggtaaacagggtcgtttccgtcagaacctgctcggtaagcgtgttgactactccggtcgttctgtaatcaccgtaggtccatacctgcgtctgcatcagtgcggtctgccgaagaaaatggcgctggagctgttcaaaccgttcatctacggcaagctggaactgcgtggtcttgctaccaccattaaagctgcgaagaaaatggttgagcgcgaagaagctgtcgtttgggatatcctggacgaagttatccgcgaacacccggtactgctgaaccgtgcaccgactctgcaccgtctgggtatccaggcatttgaaccggtactgatcgaaggtaaagctatccagctgcacccgctggtttgtgcggcatataacgccgacttcgatggtgaccagatggctgttcacgtaccgctgacgctggaagcccagctggaagcgcgtgcgctgatgatgtctaccaacaacatcctgtccccggcgaacggcgaaccaatcatcgttccgtctcaggacgttgttctgggtctgtactatatgacccgtgactgtgttaacgccaaaggcgaaggcatggtgctgactggcccgaaagaagcagaacgtctgtatcgctctggtctggcttctctgcatgcgcgcgttaaagtgcgtatcaccgagtatgaaaaagatgcaaacggtgaattagtagcgaaaaccagcctgaaagacacgactgttggccgtgccattctgtggatgattgtaccgaaaggtctgccttactccatcgtcaaccaggcgctgggtaaaaaagcaatctccaaaatgctgaacacctgctaccgcattctcggtctgaaaccgaccgttatttttgcggaccagatcatgtacaccggcttcgcctatgcagcgcgttctggtgcatctgttggtatcgatgacatggtcatcccggagaagaaacacgaaatcatctccgaggcagaagcagaagttgctgaaattcaggagcagttccagtctggtctggtaactgcgggcgaacgctacaacaaagttatcgatatctgggctgcggcgaacgatcgtgtatccaaagcgatgatggataacctgcaaactgaaaccgtgattaaccgtgacggtcaggaagagaagcaggtttccttcaacagcatctacatgatggccgactccggtgcgcgtggttctgcggcacagattcgtcagcttgctggtatgcgtggtctgatggcgaagccggatggctccatcatcgaaacgccaatcaccgcgaacttccgtgaaggtctgaacgtactccagtacttcatctccacccacggtgctcgtaaaggtctggcggataccgcactgaaaactgcgaactccggttacctgactcgtcgtctggttgacgtggcgcaggacctggtggttaccgaagacgattgtggtacccatgaaggtatcatgatgactccggttatcgagggtggtgacgttaaagagccgctgcgcgatcgcgtactgggtcgtgtaactgctgaagacgttctgaagccgggtactgctgatatcctcgttccgcgcaacacgctgctgcacgaacagtggtgtgacctgctggaagagaactctgtcgacgcggtaaaagtacgttctgttgtatcttgtgacaccgactttggtgtatgtgcgcactgctacggtcgtgacctggcgcgtggccacatcatcaacaaaggtgaagcaatcggtgttatcgcggcacagtccatcggtgaaccgggtacacagctgaccatgcgtacgttccacatcggtggtgcggcatctcgtgcggctgctgaatccagcatccaggtgaaaaacaaaggtagcatcaagctcagcaacgtgaagtcggttgtgaactccagcggtaaactggttatcacttcccgtaacaccgaactgaaactgatcgacgaattcggtcgtaccaaagaaagctacaaagtgccttacggtgcggtactggcgaaaggcgatggcgaacaggttgctggcggcgaaaccgttgcaaactgggacccgcacaccatgccggttatcaccgaagtaagcggttttgtacgctttactgacatgatcgacggccagaccattactcgtcagaccgacgaactgaccggtctgtcttcgctggtggttctggattccgcagaacgtaccgcaggtggtaaagatctgcgtccggcactgaaaatcgttgatgctcagggtaacgacgttctgatcccaggtaccgatatgcctgcgcagtacttcctgccgggtaaagcgattgttcagctggaagatggcgtacagatcagctctggtgacaccctggcgcgtattccgcaggaatccggcggtaccaaggacatcaccggtggtctgccgcgcgttgcggacctgttcgaagctcgtcgtccgaaagagccggcaatcctggctgaaatcagcggtatcgtttccttcggtaaagaaaccaaaggtaaacgtcgtctggttatcaccccggtagacggtagcgatccgtacgaagagatgattccgaaatggcgtcagctcaacgtgttcgaaggtgaacgtgtagaacgtggtgacgtaatttccgacggtccggaagcgccgcacgacattctgcgtctgcgtggtgttcatgctgtgactcgttacatcgttaacgaagtacaggacgtataccgtctgcagggcgttaagattaacgataaacacatcgaagttatcgttcgtcagatgctgcgtaaagctaccatcgttaacgcgggcagctccgacttcctggaaggcgaacaggttgaatactctcgcgtcaagatcgcaaaccgcgaactggaagcgaacggcaaagtgggtgcaacttactcccgcgatctgctgggtatcaccaaagcgtctctggcaaccgagtccttcatctccgcggcatcgttccaggagaccactcgcgtgctgaccgaagcagccgttgcgggcaaacgcgacgaactgcgcggcctgaaagagaacgttatcgtgggtcgtctgatcccggcaggtaccggttacgcgtaccaccaggatcgtatgcgtcgccgtgctgcgggtgaagctccggctgcaccgcaggtgactgcagaagacgcatctgccagcctggcagaactgctgaacgcaggtctgggcggttctgataacgagtaatcgttaatccgcaaataacgtaaaaacccgcttcggcgggtttttttatgggtgttattcagagggcaaattcttcacggaaaatattaagaaaggcagggcgaaacgaggaagaagcttttcgccctggacaacattcctgctgacggcactaccataaaaaaacacaacgctttcaacaaccttgcgtttttcatcttccgtagcggctcggaataaatttacgttcttacattccgtctcatagtctttgcgaggcgcgtcccagatagctgtcccagtctttccataccggctgcaaaccctgagcggttaacgcggcagcaaccgcttccggtctgcgatcgtcgtgcggtgagaactgttccaactcggggtgattatcggcatagccacctggctgcgttttcgagaaggcgctgacgttattgatcgccagcggaataacgcgatcgcgaaaccacggtgattcccgcgtggagagtgacagttcaatctccggtgcaagcagtcggaaggcgcagatggtttgcactaactggcgttcatccataatcgacgcaggctcaatgccgccagtacacgggcgcaggcgcggaaaggagacagagtaacggctttgccagtaatgctgttgcagccatagcaaatgttcggcaaccatatagcagtcaacgcgccagttgtcggaaaggccaattagcgcgccgaggcctatcttatcaatccccgcacgccccagccgatccggcgtttccagccgccagaagaagtcctgttttttgcctttcaaatgatggcgggtataagtcgcctcgtgatatgtctcctgataaaccatcaccccatccagaccaagttgctttaactcggcgtattccgtctccgccagcggttgcacttccatttgtagtgaagagaactgttcacgcagggcggggagatgacgacgaaagtaatccatccccactttcgcctgatgttcaccagtgactaatagcagatgttcaaagcccatctcccgtatagcggcgctttccctggcaatatccgcttcatccagcgttttgcgcttgatgcgattactcatggaaaatccgcagtacgtgcagtcgttagcgcaaagattggaaagataaagcgggacgtagaaactaactgtgttgccaaatcgctgacgggtcagacgctgcgcccgttgggccagtggttccagatagccactggcggctggcgataacagcgccatcatatcgtcgcgggtgagttgcgaggcatttagcgcccgttctacgtcagcagccgttttgccgttgatacgcaggcggatgtcgtcccagtccagttgtcgccagcgatcgctgaaggttttcatgccgatgcctccagaaatccagtcagcgggctggtggcatgagcaaaatgactgcggctgcccggtccggactgacgtgccagcaggcctgcttctaccgccagacgaaatgccttcgccatgttgacgggatcgtccgctacggcaatcgccgtattcactaacaccgcgtcggcccccatttccagggcctgcgcggcatggctgggaacgccgatgccagcatcgacaaccaccggaactgtggcctgctggataataatctccagcatggcacgggtttccagtccctgattcgagccaatcggcgcgccgagcggcatcaccgctgcacagccgacttcttccagacgtttacacaataccggatcggccccgcagtaaggcagcacgacaaatccctgttgtaccagcatttcggcggctttcagagtttcgatgggatcgggcaacagccagcgggcgtcagggtgaatctctaattttaaccagtttgtgcctaacgcttcacgtgccagatgggcggcgaaaatggcttcttccgctgttttcgccccggaagtatttggcagcagggtcacacccgccgcgataagcggttcgaggatagcgtcgttgtgctggcgcaagtcgacacgtttcatcgccagtgtcaccagctggctgccggaagcgcggatcgcctccaccatcagttgtgaagaagcgaatttccctgtgccggtaaacagatgtgaatcaaacgttttgtccgcaatacgtaacatctcaaccccctgcaataacctgaaaaagcaggatctggtcgccatcctgcacgatatgttgcgtccactgctcacgcgggacgatttgctgattaatcgccagagccgcgcccgcttgtcgttggtcgagttgctccagtagttcgtgaacagtttgcccggcggcgcactgcatcggttgatcgttaaacaggatctgcattgcttcctccgcataccgggcaaccactggcgcggcgcaacgccaggctgcgccactggctcgatttaccgtcgaacagtcggagttctcccgcaggtgtctctataccgcttaataacttaatggcttccagtgcctgcaaagtgcccataaccccgaccaccgggccaaccacgcccgccgtgcggcagttgcgttctggctcctggttatctggccacaggcagcggtaacacccctgctcccagggcggcgtcagtaccatcaactgaccgccaaatccgaccgcgctggcggtgataagcggcgtgttgagtaccacgcaggcggcattaatctcctggcgagtcgccatattgtcggtacagtcgagcaccacatcggcccgtgcaaccgcatcttttaacgcctcacccgttaaccgttgttgtaatgctgtcagttgaatatcgggattcaactgtgtcagtcgctgatggctgacctgcgatttcgggcgatcgatatcttcagtggtaaagaggatttgtcgttgcagattgcttaaatgcacatcgtcgtcatctgccagtaccagcgtcccgacgccagcccccgccaggtatagcgcagcaggtgtacccagcccgccaagaccaataatcagcacctggctgtcgagcagtttttgctgcccgtccagagcgatatcgtcgagcagaatttggcggctataacgcataaagtcacggtcattcatcgccaactcctgcaatttccagcaactgtgccgttgccaaacgccagtctgcggcttgagtaatggcgctgacgacggcgatactgccgacacccgttgctatcaccgcaggcgcgcgcgccagactgataccgccaatcgccacggtgggataatccgccagtcgctcaacatgccgtgccagctgttccagcccctgcggtgcagaaggcatctgtttggtttgcgtcgggaacacatgtcccagcgcgatataagaggggcgtgctgccagcgcgacgtcgatttccatatcgtcatgtgtcgaaacgcccagccgcaggcctgccgcgcggatggcattgagatcggtggcttgcaaatcttcctgccccaaatggacgccatacgcctgatgcttgatcgccagccgccagtaatcgttgataaacaatcgcgcgttatagcggcggcccagcgcaattgccgccacgacatcggcttccacctcttcattgcgccgatctttgatgcgtagctggagagtacgtacgcctgcatccaacagacgttcgatccactgtacgctgtccaccaccgggtacagtcctaaacgaaaaggtacaggaggaaaatcaggctgatacatcacgcttcctccttacgcaggtagatttctccgcctctggcgcggaagttctccgacatatccgccattcccacttcaatggtttgcgcggcggcgtaatcacgtacttcctggctgattttcatcgagcagaatttcggcccacacatggagcaaaaatgggcgactttacctgactcttgcggcagggtttcatcgtgataagcgcgggcggtaaacgggtcgagggccagattaaactggtcttcccagcgaaattcgaagcgggctttcgacatggcgttatcgcgaatttgcgcgcctggatgccctttcgccaggtcagcggcgtgggcggcaatcttataggtgataagcccctgcttaacatcttctttattaggcagacccagatgctcttttggcgttacgtaacagagcatcgcgcagccaaaccagccaatcatcgccgcaccaatccccgacgtgaagtggtcatagcccggcgcaatatcggtagttagcggccccagagtgtaaaacggcgcttcgtggcagtgctctaactcctcggtcatattgcggcggatcatctgcatcggcacgtggcctgggccttcaatcatcacctgcacgtcatattcccaggcaattttggtcagttcgcccagcgtatgcagctcggcaaactgcgcttcatcgttggcgtcctgaatagaaccggggcgcagaccgtcgcccagcgacagcgaaacgtcataagcggcacagatttcacaaatttcgcggaagtgttgatagaggaaattttcctgatgatgggagaggcaccatttcgccataatcgaaccgccgcgagagacgataccggtcaggcgtttcgcggtcatcggcacatagcgcagcagtacgcccgcatggatagtgaagtaatccacaccttgctcggcctgttccagcagcgtgtcgcggaacgcttcccaggtaagatcttcggcgatcccgttaaccttctccagcgcctggtagatcggcactgtaccgatcggcaccgggctgttacgcaaaatccactcgcgggtttcgtgaatatagcgaccggtggagagatccatcaccgtatccgctccccagcgcgtggaccataccagcttttccacttcttcttcgatggaagaggtgaccgccgagttgccgatattggcgttaacttttaccaggaaattgcgaccaataatcatcggctccgattccggatgattaatgttggccgggataatcgcacgtccggcagcaacttcatcacggacaaattccgcagtgatattttccggcagatgtgcgccaaagctcattcccggatgctggtggcgtaaaacctcgctacggatgcgctcgcggcccatattctcgcggatggcgatgaattccatttccggcgtgatgatgccctggcgggcgtagtgcagttgggtgacacggcgtcctgttttggcgcgttttggcgttaataagccgctaaaacgtagctcgtcgagaccatcatctgccagccgcgttctggtgtaatcggaactgcgcacggtaagttcttcggtatcgccgcgcgcatcgatccacggctggcgtagttttgccagcccttgctgcacgttaatggcgatctgcggatcaccatacgggccggaggtgtcgtagaccggaatcgcttcgttttcttcgtactgcggctgttctttgctaccgccaattagcgtcgggctaagctggatctcacgcatcggcacgcgcacgccggggtgtgtgccagtgatataaatgcgttttgagttgggaaaggcggtgccttccagggtgtcgataaaatgttgggcccgggcgcgttgttcgcggcgggtcagttttgttgcagacatagctcattccaaaaagtcaaggacgtggcttgtcagacgacggatgaagcaagagacgatcgccgcaaaggcgatgcgatagcagattaactcttgttcccttcgcaggtattagcctgatcaggttccgcggatcccgaataaacggtctcagccagttaaggcactccgacaagaaattagcccccacaaacggggcgttgaatgtaaattacgcgttaacagcgcagaactcaagcaggatgtttgacgcgggcggcgtcaagcaccagcagaatcagcttatcttccagcacaaagcgcgcttccagcgcctcgccgatgtcagataaaacctgttgaaactcaaggtaattatcatgatcgatggcggtttccaggctggaatcgtagtaatccataatctgttgggtattggcttcgagttgcggccaaatcttcgcggcgcgcgcgagttgcccgttgccttccagcttatgaagaatgcgctcataaatactgaaatgtccggcagacaagtaatcgaccaggctctgacaaaaatcatcaagggctttttcgtttagcctcatgtacgattctttgccaagcttaatgccaaccagattgtagtaagccacgagcagatgcttacgtacatgtagccagcgatcaaccagtttgttacttcctctgacgcgctccgtcaggttatcgagctggttaagcatgattgactccgcaagtttgtattcaaaaactgctcagtgagaaatgtaaaaaccatgttaaacatgccagtgatgcaaaggtagtgcaagagctatggatcgtataattgaaaaattagatcacggctggtgggtcgtcagccatgaacaaaaattatggttgccgaagggagaattgccatatggcgaagcggcaaatttcgatcttgtgggtcagcgcgcactacaaatcggcgaatggcagggggaacctgtttggttagtacaacagcagcggcgtcacgatatggggtcggtacgtcaggtcattgatctcgatgttgggctgtttcaactggccggacgaggcgtacaactggcggagttttaccgatcgcataaatactgtggttactgcgggcatgaaatgtatccgagcaaaaccgaatgggcgatgctgtgcagccattgccgtgagcgttactacccgcaaatcgccccctgcattattgttgccatccgtcgcgatgattcgatcctcctcgcccagcatacccgccatcgtaacggtgtccatacagtacttgccggattcgtcgaagtgggcgaaaccctcgagcaggcagtcgcgcgggaagtgatggaagagagcggaattaaagttaaaaacttgcgttacgtgacttctcagccgtggccgtttcctcagtctttaatgaccgcgtttatggcggaatatgacagcggcgacatcgtgatcgacccgaaagaattgctcgaggcgaactggtatcgctatgacgatttgccgttactcccgccgcccggcaccgtagcgcgccgtctgatagaagatactgtggcgatgtgtcgggcagagtatgagtgatgatacactgaccgcctgacgcactaaggaacagccaaaatgaccgaacttaaaaacgatcgttatctgcgggcgctgctgcgccagcccgttgatgtcactccagtatggatgatgcgccaggcgggtcgctatctaccggaatataaagccacgcgcgcccaggcgggcgattttatgtcgctgtgcaaaaacgccgagctggcgtgcgaagtgactttgcaaccgctgcgtcgctacccgctggatgcggcgatcctcttttccgatatcctcaccgtgccggacgcgatggggttagggctctattttgaagccggagaaggtccgcgttttacctcgccagtcacctgcaaagccgacgtcgataaactgccaattccggacccggaagatgagctgggttacgtgatgaacgcggtgcgtaccattcgtcgcgaactgaaaggcgaagtgccgctgattggtttttccggcagcccgtggacgctggcgacctacatggtggaaggcggcagcagcaaagcgttcaccgtgatcaaaaaaatgatgtatgccgatccgcaggcgctgcacgctctactcgataaactggcgaaaagcgtcactttgtatctgaatgcgcagattaaagccggtgctcaggcagtgatgattttcgacacctggggcggtgtgcttaccgggcgcgattatcaacagttctcgctctattacatgcataaaattgttgatggtttactgcgtgaaaacgacggtcgccgcgtgccagtcacgctgtttaccaaaggcggcggacagtggctggaagcgatggcagaaaccggttgcgatgcgttgggcctcgactggacaacggatatcgccgatgcgcgccgccgtgtgggcaataaagtcgcgttgcagggtaatatggatccgtcgatgctgtacgcgccgcctgcccgcattgaagaagaagtagcgactatacttgcaggtttcggtcacggcgaaggtcatgtctttaaccttggtcacggcattcatcaggatgtgccgccagaacatgctggcgtgttcgtggaggcagtgcatcgactgtctgaacaatatcaccgctaaggagtgattatggatctcgcgtcattacgcgctcaacaaatcgaactggcttcttctgtgatccgcgaggatcgactcgataaagatccaccggatctgatcgccggagccgatgtcgggtttgagcagggcggagaagtgacgcgagcggcgatggtgctgctgaaatatccctcgcttgagctggtggagtataaagttgcccgcatcgccaccaccatgccttacattccaggttttctttccttccgcgaatatcctgcgctgctggcagcgtgggagatgctgtcgcaaaagccggatttagtgtttgtcgatggtcatgggatctcgcatcctcgccgtcttggcgtcgccagccattttggtttgatggtggatgtgccaacgatcggcgtggcgaaaaaacggctctgcggtaaattcgaaccgctctccagcgaaccgggcgcgctggccccactgatggataaaggcgagcagctggcctgggtctggcgcagcaaagcgcgctgtaacccgttgtttatcgctaccggccatcgggtcagcgtggacagcgcgctggcgtgggtacaacgctgcatgaaaggctatcgtctgccggagccaacgcgctgggcggacgcggtggcctcggaacgtccggcgttcgtgcgctatacagcaaatcagccctaattcaggtaaactgcggataatttccgtatttgagaactcaacatgttacaaaacccaattcatctgcgtctggagcgcctggaaagctggcagcatgtcactttcatggcttgcttatgcgaacgcatgtaccccaattacgccatgttctgccagcaaaccggttttggtgatgggcaaatttaccgtcgtattctcgatctcatctgggaaacgctgaccgttaaagacgcaaaagtaaatttcgacagccaactggagaaatttgaagaagcgattccttcagccgacgatttcgatctgtacggcgtttatccggcaatcgatgcctgcgtggcgttaagtgaactggtccattcgcgtttgagtggtgaaacgctcgaacacgcggtggaagtgagtaagacctccatcacgaccgttgcgatgctggaaatgactcaggctggtcgcgaaatgagcgatgaagagcttaaagaaaacccagctgtagagcaagaatgggacattcagtgggaaatattccgacttttagctgagtgcgaagaacgcgatatcgagctgataaaaggccttagggcagacctgcgtgaggcgggtgagagcaatattggtataatttttcagcaataagaccagaaaacgtgatttaacgcctgatttgtcgtacctggagtcttccctttcgccccccgtctggtctacatttggggggcgaaaaaaagtggctatcggtgcgtgtatgcaggagagtgctattctggcatttccgtcgcactcgatgcttagcaagcgataaacacattgtaaggataacttatgaacaagactcaactgattgatgtaattgcagagaaagcagaactgtccaaaacccaggctaaagctgctctggagtccactctggctgcaattactgagtctctgaaagaaggcgatgctgtacaactggttggtttcggtaccttcaaagtgaaccaccgcgctgagcgtactggccgcaacccgcagaccggtaaagaaatcaaaattgccgcagctaacgtaccggcatttgtttctggcaaggcactgaaagacgcagttaagtaagattgcgtggcagtgaacagttttaacgaaggggtggtttcaccccttttgtctttctggcgtcgatcattgatgctggctggcgctctgcttctcactgcctgtagtcataactcttcacttcctccctttaccgccagtggatttgctgaagaccagggcgcggtacgcatctggcgaaaagacagcggcgataatgtgcatctgcttgccgtgtttagcccgtggcgcagtggcgataccacgacgcgagagtatcgctggcagggcgataacctcacgctcatcaatatcaatgtttacagcaaaccgccggtgaatattcgcgcgcgttttgacgatcgcggtgatctgagctttatgcaacgtgaatccgatggggaaaagcagcagctttctaacgaccaaatcgatttataccgttatcgtgctgatcagatccgccagattagcgatgccttacgtcaggggagagtcgtgctgcgccaggggcgctggcatgcgatggaacagaccgtgaccacctgcgaagggcaaaccattaaacctgatttagattcgcaggcgatagcgcatatcgagcgccgccagagccgctcttctgttgatgtcagcgtggcatggctggaagcgcccgaaggttcgcaattactgttagtggcaaactctgatttctgtcgctggcaacccaacgagaaaacgttctgatttaccagtggcccatacccatatgaccgccaccaccgcagccgccgtagcccatgcccattccggctccgcgcggaatacccgcttcagccatcgcgatatctcgtttcacccgtaactcatctaacgactgacgcaaattctccatctctttggcgaccgcgttaattttgctgctatccggtgggttcgcggctaacagggcattgtattcataacgcttcgtcaccagttgctgttgcagtgcgctgctttgagcgtaaaagtcattatggattttctgccacgctgtctgttgttcgctggtcaaaggcgcggcattttgctgccacataccgtgtccgccgtgagcaaatgcagatgtcgatcccatcgccattgctgaaagcgccatcattaccagggcaattttcgtgttccgtttcatggttaatcctccagtggttgtcttacttcgggtattgcatcttccgtgccaacgatgaaacgctgatatgacgggtaatctggcatgataaacgagtaaaaatgactcgcctgctgcgggtagcgagtcatttttactcattgaaacttaagcctttgtgttacagcgcagggtaagcgctgataaaagatggcatgatttctgctgtcagaaagggatgagcaggcaaagaagaagatgcgttttatgcaacgttctaaagactccttagctaaatggttaagcgcgatcctccccgtggtcattgttgggctggtagggttgtttgcggtgacggtgattcgcgattatgggcgcgagactgccgccgccagacaaacgctgctggaaaaaggcagtgtacttattcgcgctcttgaatccggctcgcgcgtcggcatggggatgcgcatgcatcatgcgcagcagcaggccttactggaagaaatggccgggcagcctggagtacgttggtttgcggtcacggatgaacaaggaacaatcgtgatgcatagcaactccggcatggtgggaaaacagctttattccccgcaggaaatgcagcagttacatccgggagatgaagaagcgtggcggcggatcgatagcgcagacggcgagcctgttctggaaatttatcgccagtttcaaccgatgtttgctgctggaatgcaccggatgcgccatatgcagcagtatgccgcgacaccacaagcaattttcatcgctttcgacgccagtaatattgtgagtgccgaagatcgtgagcagagaaacaccctgattatcctcttcgccctggcgacggtcttgctggcaagcgtattgtcattcttctggtatcgccgctatttgcgctcgcgccagcttctacaagatgaaatgaagcgcaaagagaagctggtggcgctggggcatcttgcggcaggcgttgcccacgaaatccgtaacccactttcctcgattaaaggactggcgaaatactttgccgagcgcgcgcctgcagggggagaagcgcatcaactggcgcaggtgatggcgaaagaggccgaccgtttaaaccgcgtggtaagcgagctgctggaactggttaagccaacgcatctggctttgcaggcggtggatctcaacacgctgattaaccactcattacagctggtaagccaggatgcgaacagccgggagatccagttacgctttaccgccaacgacacattaccggaaattcaggccgatccggacaggctgactcaggtcctgttgaatctctatctcaatgctattcaggcgattggtcagcatggcgtgattagcgtgacggccagcgaaagcggcgcgggcgtgaaaatcagcgttaccgacagcggtaagggaattgcggcagatcagcttgatgccatcttcactccgtacttcaccactaaagccgaaggcaccggactggggctggcggtcgtgcataatattgttgaacaacacggtggtacaattcaggtcgcaagccaggagggaaaaggcgcaacgttcaccctctggcttccggtcactattacgcgtaagggcccacaaggatgacgcacgataatatcgatattctggtggtggatgatgacattagccactgcactattttgcaggctttactgcgcggctggggctataacgtcgcgctggcgaacagcgggcgacaggcgctggagcaggtgcgggaacaggtttttgatcttgtgctttgcgatgtgcgaatggcggagatggacggcattgccacgctaaaagagatcaaagcgttaaatccggcgattccggtgctgattatgaccgcatactccagcgtcgagacggcggtagaagcgttgaaaaccggggcgctggattatctcatcaagccgctggatttcgataacctgcaggcgacgctggaaaaggcgctcgcgcatacgcacagtattgacgctgaaacgcctgcggtgtctgccagccagttcggtatggtcggtaaaagcccggcgatgcaacacctgctcagtgaaatcgccctcgtcgcgccatcggaagccacggtgctgatccacggcgattccggcaccggtaaagagctggtcgccagggcgattcacgccagtagcgcacgtagcgaaaaaccgctggtaacgctcaactgtgcggcactcaacgaatccttgctggaatctgaattgttcggtcacgaaaaaggggcgttcactggagccgatagacgccgggaagggcgctttgttgaggcggacggcggcacgctgtttctcgatgaaattggcgatatctcgccgatgatgcaggtgcgtctgctgcgtgcgattcaggagcgcgaagttcagcgtgtcggtagcaaccagactatctcggttgatgtccggttgattgcggcgacccatcgcgatcttgccgcagaggtgaatgccgggcgttttcgccaggatctctactatcgcctgaatgtggtggcgattgaagtaccatcgctgcggcaacggcgggaagatatccctctgctggctgtccattttcttcagcgctttgccgagcgtaatcgcaaggcggtaaaaggctttacgccacaggcgatggatttgctgatccactacgactggccgggaaatattcgtgaactggaaaacgcggtggaacgggcggtggtgctgctgaccggggaatatatttccgaacgcgagctgccgctggcgattgccggtacgccgatcccactggggcaaagtcaggatattcagccgctggtggaagtcgaaaaagaagtgattctggcggcactggagaaaacgggcggcaacaaaaccgaagccgcccgtcagttagggatcacgcgcaaaacgctattggcaaaactgtcgcgttagttctgctcgcgttcgatagcgcgccagccgatatctttccggcagaagcagtcgtcccagtgaatatcggtcattaaggcataagcgcgtttctgcgcttctgccacggtatgacccagcgcggtgacgcacagtacgcgcccgccgctggtcactacctgctcgttatccgccagtttcgtgcccgcgtggaacactttgccgcctgccacttcttccagcggcaggccgtggatcacatcgccggtgcggtaatcgcccggatatccacccgcagccatcaccacgccgagagaagcacgctcatcccactctgacgttttctcgtccagtttgccttcacaggccgccaggcagagctcaaccagatcggacttcatgcgcagcataatcggctgggtttctggatcgccaaagcggcagttaaattcgataaccttcggattgccctgtttgtcgatcatcaggcccgcgtagagaaaaccggtgtaggtgttgccttccgccgccatgcctttcacggttggccagatgatacgttccatggtgcgctgatgaacttcatcggttactaccggcgcgggggagtaagcgcccatcccgcccgtgtttggtccggtatctttatcgcctacgcgtttgtgatcctggctggtggccatcggcagcacatgctcgccgtctaccatcacgataaagctcgcttcttcgccgtcgaggaactcttcgataacgatgcgatgacccgcgtcgccaaaagcgttgcccgccagcatatcgtgaacagccgcttcggcttcttccagcgtcatcgccacgataacgcctttcccggctgccagaccgtccgctttaatgacgatcggcgcacctttctcacgcagatacgccagcgcaggttctacctcggtgaagttctggtattccgctgtagggatcttatggcgggccaggaaatctttggtaaacgctttcgaaccttccagttgcgcggcacctgcggttgggccgaagattttcatcccggcggcgcggaaggtatcgaccacgcctttcaccagcggcgcttccgggccgacgatggtcagatcaatcttttcgttttgtgcgaaatccaacagcgccgggatatcggtcacgccgatagcaacgttttgcagcgcgggttccagcgcagtgcctgcattacccggagcaacaaaaacagtttcaaccagcggcgactgcgccgctttccaggccagcgcgtgctcgcgcccgccgttaccaatcactaatactttcatctattgctccattaatggcggaagtggcgcatgtcggtgaagagcatcgcaataccgtgctcgtcggcggcggcaatcacttcgtcatcacggatagaaccgccaggctggattacgcaggtcacgcctgcagcggcggcggcatcaataccgtcgcggaacgggaagaacgcgtcagaagccatcgaggaacctttcacttccaggccttcatcggcagctttaataccggcgattttcgcggagtacacgcggctcatctggcccgcgccaatcccgatggtcatattgtttttggcatagacgatagcgttggatttcacgaacttcgccactttccagcagaacagcgcatcacgcagttcctgttcggtcggctgacgttgggtgacgacgcgcagttcttccgcaccgaccatgcccaggtcacgatcctgaaccagcagaccgccgttcacgcgtttgaaatcaagacccggaacacgctcgccccactgaccgcaggtcagaacgcgtacgttctgcttggcggcggtgattttcagggcttcttcgctggcggaaggcgcaataatcacttcgacaaactgacgagaaatgatggcctgtgcggtttccgcatccagctcgcggttaaaggcaatgatgccgccgaatgcggaggttgggtcggttttgtacgcgcgatcgtaagcatcaagaatggaattgccgatagccacgccgcaagggttggcgtgcttcacaatcacacatgccggctcggcgaactctttcacgcactccagcgccgcatcggtatcggcgatgttgttataagagagggctttaccctgaacctgggttgcggtagcaacggaggcttctttcacattctcttctatatagaaggcagcctgctggtggctgttctcgccgtaacgcatatcctgcttcttaatgaagttcaggttcagcgtgcgtgggaagcgaccggcggcttctttgctttcaccgtggtaagccggaaccatgctgccgaagtagttggcaatcatgctgtcgtaggcggcagtgtgttcgaaggctttgatggcgaggtcgaaacgggttgcaagcgtcagcgatccttcgttgtcatccatctctttaataatggcgtcgtagtcgctgctcttcaccacgattgcgacatctttatggttcttagcggcggagcgcaccatggtcgggccgccgatatcgatgttctcaaccgcatcttccagcgagcagccttcacgagcaacagtctgggcgaacggatacaggttaacaaccaccatatcgataggctggatctgatgttcttccataatggcatcgtcctggccgcgacggcccagaatgccaccatgtactttcggatgcagggtcttcacgcgtccatccatcatctccgggaaaccggtgtaatcggaaacttcggttaccggcagacctttttctgctaacagacgggcagtgccccctgtagacagcagctccacaccgcgtgcggaaagtgcctgggcgaattcgacgataccggctttgtcagaaacactgagcagagcgcggcggactggacgacgttgttgcatggtaaatcccctggatttgactattacagagagcgttagctgaatttttcgcgaaaaactcagctaacgcccctaacggggcatccttatttttcgcccgcattgtaacgaaaacgtttgcgcaacgctcgcgaatttttctctttcaatggtgatcacaattttgacagtggttaccgtgggaaaaatacagaaattacattgatgattgtggataactctgtgcgtaaaaaggtataaagcggggttttgctggggaatgcagcagtcagtcatttttctgcaatttttctattgcggcctgcggagaactccctataatgcgcctccatcgacacggcggatgtgaatcacttcacacaaacagccggttcggttgaagagaaaaatcctgaaattcagggttgactctgaaagaggaaagcgtaatatacgccacctcgcgacagtgcgctaaagcgcgtcgcaactgctctttaacaatttatcagacaatctgtgtgggcactcgaagatacggattcttaacgtcgcaagacgaaaaatgaataccaagtctcaagagtgaacacgtaattcattacgaagtttaattctttgagcatcaaacttttaaattgaagagtttgatcatggctcagattgaacgctggcggcaggcctaacacatgcaagtcgaacggtaacaggaaacagcttgctgtttcgctgacgagtggcggacgggtgagtaatgtctgggaaactgcctgatggagggggataactactggaaacggtagctaataccgcataacgtcgcaagaccaaagagggggaccttcgggcctcttgccatcggatgtgcccagatgggattagctagtaggtggggtaacggctcacctaggcgacgatccctagctggtctgagaggatgaccagccacactggaactgagacacggtccagactcctacgggaggcagcagtggggaatattgcacaatgggcgcaagcctgatgcagccatgccgcgtgtatgaagaaggccttcgggttgtaaagtactttcagcggggaggaagggagtaaagttaatacctttgctcattgacgttacccgcagaagaagcaccggctaactccgtgccagcagccgcggtaatacggagggtgcaagcgttaatcggaattactgggcgtaaagcgcacgcaggcggtttgttaagtcagatgtgaaatccccgggctcaacctgggaactgcatctgatactggcaagcttgagtctcgtagaggggggtagaattccaggtgtagcggtgaaatgcgtagagatctggaggaatatcggtggcgaaggcggccccctggacgaagactgacgctcaggtgcgaaagcgtggggagcaaacaggattagataccctggtagtccacgccgtaaacgatgtcgacttggaggttgtgcccttgaggcgtggcttccggagctaacgcgttaagtcgaccgcctggggagtacggccgcaaggttaaaactcaaatgaattgacgggggcccgcacaagcggtggagcatgtggtttaattcgatgcaacgcgaagaaccttacctggtcttgacatccacggaagttttcagagatgagaatgtgccttcgggaaccgtgagacaggtgctgcatggctgtcgtcagctcgtgttgtgaaatgttgggttaagtcccgcaacgagcgcaacccttatcctttgttgccagcggtccggccgggaactcaaaggagactgccagtgataaactggaggaaggtggggatgacgtcaagtcatcatggcccttacgaccagggctacacacgtgctacaatggcgcatacaaagagaagcgacctcgcgagagcaagcggacctcataaagtgcgtcgtagtccggattggagtctgcaactcgactccatgaagtcggaatcgctagtaatcgtggatcagaatgccacggtgaatacgttcccgggccttgtacacaccgcccgtcacaccatgggagtgggttgcaaaagaagtaggtagcttaaccttcgggagggcgcttaccactttgtgattcatgactggggtgaagtcgtaacaaggtaaccgtaggggaacctgcggttggatcacctccttaccttaaagaagcgtactttgcagtgctcacacagattgtctgatagaaagtgaaaagcaaggcgtcttgcgaagcagactgatacgtccccttcgtctagaggcccaggacaccgccctttcacggcggtaacaggggttcgaatcccctaggggacgccacttgctggtttgtgagtgaaagtcacctgccttaatatctcaaaactcatcttcgggtgatgtttgagatatttgctctttaaaaatctggatcaagctgaaaattgaaacactgaacaacgaaagttgttcgtgagtctctcaaattttcgcaacacgatgatgaatcgaaagaaacatcttcgggttgtgaggttaagcgactaagtgtacacggtggatgccctggcagtcagaggcgatgaaggacgtgctaatctgcgataagcgtcggtaaggtgatatgaaccgttataaccggcgatttccgaatggggaaacccagtgtgtttcgacacactatcattaactgaatccataggttaatgaggcgaaccgggggaactgaaacatctaagtaccccgaggaaaagaaatcaaccgagattcccccagtagcggcgagcgaacggggaggagcccagagcctgaatcagtgtgtgtgttagtggaagcgtctggaaaggcgcgcgatacagggtgacagccccgtacacaaaaatacacatattgtgagctcgatgagtagggcgggacacgtggtatcctgtctgaatatggggggaccatcctccaaggctaaatactcctgactgaccgatagtgaaccagtaccgtgagggaaaggcgaaaagaaccccggcgaggggagtgaaaaagaacctgaaaccgtgtacgtacaagcagtgggagcacgcttaggcgtgtgactgcgtaccttttgtataatgggtcagcgacttatattctgtagcaaggttaaccgaataggggagccgaagggaaaccgagtcttaactgggcgttaagttgcagggtatagacccgaaacccggtgatctagccatgggcaggttgaaggttgggtaacactaactggaggaccgaaccgactaatgttgaaaaattagcggatgacttgtggctgggggtgaaaggccaatcaaaccgggagatagctggttctccccgaaagctatttaggtagcgcctcgtgaattcatctccgggggtagagcactgtttcggcaagggggtcatcccgacttaccaacccgatgcaaactgcgaataccggagaatgttatcacgggagacacacggcgggtgctaacgtccgtcgtgaagagggaaacaacccagaccgccagctaaggtcccaaagtcatggttaagtgggaaacgatgtgggaaggcccagacagccaggatgttggcttagaagcagccatcatttaaagaaagcgtaatagctcactggtcgagtcggcctgcgcggaagatgtaacggggctaaaccatgcaccgaagctgcggcagcgacgcttatgcgttgttgggtaggggagcgttctgtaagcctgcgaaggtgtgctgtgaggcatgctggaggtatcagaagtgcgaatgctgacataagtaacgataaagcgggtgaaaagcccgctcgccggaagaccaagggttcctgtccaacgttaatcggggcagggtgagtcgacccctaagacgaggccgaaaggcgtagtcgatgggaaacaggttaatattcctgtacttggtgttactgcgaaggggggacggagaaggctatgttggccgggcgacggttgtcccggtttaagcgtgtaggctggttttccaggcaaatccggaaaatcaaggctgaggcgtgatgacgaggcactacggtgctgaagcaacaaatgccctgcttccaggaaaagcctctaagcatcaggtaacatcaaatcgtaccccaaaccgacacaggtggtcaggtagagaataccaaggcgcttgagagaactcgggtgaaggaactaggcaaaatggtgccgtaacttcgggagaaggcacgctgatatgtaggtgaagtcccttgcggatggagctgaaatcagtcgaagataccagctggctgcaactgtttattaaaaacacagcactgtgcaaacacgaaagtggacgtatacggtgtgacgcctgcccggtgccggaaggttaattgatggggtcagcgcaagcgaagctcttgatcgaagccccggtaaacggcggccgtaactataacggtcctaaggtagcgaaattccttgtcgggtaagttccgacctgcacgaatggcgtaatgatggccaggctgtctccacccgagactcagtgaaattgaactcgctgtgaagatgcagtgtacccgcggcaagacggaaagaccccgtgaacctttactatagcttgacactgaacattgagccttgatgtgtaggataggtgggaggctttgaagtgtggacgccagtctgcatggagccggccttgaaataccaccctttaatgtttgatgttctaacgtggacccgtgatccgggttgcggacagtgtctggtgggtagtttgactggggcggtctcctcctaaagagtaacggaggagcacgaaggttggctaatcctggtcggacatcaggaggttagtgcaatggcataagccagcttgactgcgagcgtgacggcgcgagcaggtgcgaaagcaggtcatagtgatccggtggttctgaatggaagggccatcgctcaacggataaaaggtactccggggataacaggctgataccgcccaagagttcatatcgacggcggtgtttggcacctcgatgtcggctcatcacatcctggggctgaagtaggtcccaagggtatggctgttcgccatttaaagtggtacgcgagctgggtttagaacgtcgtgagacagttcggtccctatctgccgtgggcgctggagaactgaggggggctgctcctagtacgagaggaccggagtggacgcatcactggtgttcgggttgtcatgccaatggcactgcccggtagctaaatgcggaagagataagtgctgaaagcatctaagcacgaaacttgccccgagatgagttctccctgaccctttaagggtcctgaaggaacgttgaagacgacgacgttgataggccgggtgtgtaagcgcagcgatgcgttgagctaaccggtactaatgaaccgtgaggcttaaccttacaacgccgaaggtgttttggcggatgagagaagattttcagcctgatacagattaaatcagaacgcagaagcggtctgataaaacagaatttgcctggcggccgtagcgcggtggtcccacctgaccccatgccgaactcagaagtgaaacgccgtagcgccgatggtagtgtggggtctccccatgcgagagtagggaactgccaggcatcaaattaagcagaaggccatcctgacggatggcctttttgcattggcgcagaaaaaaatgccgggtgcgacgctggcgcgtcttctccagcctgggcaggcacggcaggggcagcttattcctccacatacgccagattcagcaacggatacggtttccccaaatcgtccacctcagagcgtcccgtaaccttaaaacccaccttcttatagaacccaaccgcctgctcattttgctcattaacgttggttgtcagttccggtgccatcgagagcgcatgctccaccagcatccgacccacgccgcagccgcacacatcaggatcgataaacagcgcatccatatgctgcccacttaacaacataaacccaaccggctgatcccgttcattaaccgcgacccacaacggcgcttccggcaggaaggaacgaactagcacctccagctcggcccgatactctgctgataaaaaatcgtgtgtggcatcgacagaacgacaccaaatcgcaacgagttcctccccttcctcatgccgtgagcggcgaatactaataaccattttctctccttttcgtcattcttatattctaacgtagccttttccttgaaactttctcaccttcaacatgcaggctcgacattggcaaattttctggttatcttcagctatctggatgtctaaacgtataagcgtatgtagtgaggtaatcaggttatgccgattcgtgtgccggacgagctacccgccgtcaatttcttgcgtgaagaaaacgtctttgtgatgacaacttctcgtgcgtctggtcaggaaattcgtccacttaaggttctgatccttaacctgatgccgaagaagattgaaactgaaaatcagtttctgcgcctgctttcaaactcacctttgcaggtcgatattcagctgttgcgcatcgattcccgtgaatcgcgcaacacgcccgcagagcatctgaacaacttctactgtaactttgaagatattcaggaacaaaactttgacggtctgatagttaccggcgcgccgctgggcctagtggagtttaatgatgtcgcttactggccgcagatcaaacaggtgctggagtggtcgaaagatcacgtcacctcgacgctgtttgtctgctgggcggtacaggccgcgctcaatatcctctacggcattcctaagcaaactcgcaccgacaaactctctggcgtttacgagcatcatattctccatcctcatgcgcttctgacgcgtggctttgatgattcattcctggcaccgcattcgcgctatgctgactttccggcagcgttgattcgtgattacaccgatctggaaattctggcagagacggaagaaggggatgcatatctgtttgccagtaaagataagcgcattgcctttgtgacgggccatcccgaatatgatgcgcaaacgctggcgcaggaatatttccgcgatgtggaagccggactagacccggatgtaccgtataactatttcccgcacaatgatccgcaaaacaaaccgcgcgcgagctggcgtagtcacggtaatttgctgtttaccaactggctcaactattacgtctaccagatcacgccatacgatctacggcacatgaatccaacgctggattaatcttctgtgatagtcgatcgttaagcgattcagcaccttacctcaggcaccttcgggtgccttttttatttccgaaacgcacctcagcaagtgaataaattttattcatattgttatcaataagttatcaagtatttttaattaaaatggaaattgtttttgattttgcattttaaatgagtagtcttagttgtgctgaacgaaaagcgcacaacgatccttcgttcacagtggggaagttttcggatccatgacgaggagctgcacgatgactgaacaggcaacaacaaccgatgaactggctttcacaaggccgtatggcgagcaggagaagcaaattcttactgccgaagcggtagaatttctgactgagctggtgacgcattttacgccacaacgcaataaacttctggcagcgcgcattcagcagcagcaagatattgataacggaacgttgcctgattttatttcggaaacagcttccattcgcgatgctgattggaaaattcgcgggattcctgcggacttagaagaccgccgcgtagagataactggcccggtagagcgcaagatggtgatcaacgcgctcaacgccaatgtgaaagtctttatggccgatttcgaagattcactggccccggactggaacaaagtgatcgacgggcaaattaacctgcgtgatgcagttaacggcaccatcagctataccaatgaagcaggcaaaatttatcagctcaagcccaatccagcggttttgatttgtcgggtacgcggtctacacttgccggaaaaacatgtcacctggcgtggtgaggcaatccccggtagcctgtttgattttgcgctctatttcttccacaactatcaggcactgttggcaaagggcagcggtccctatttctatctgccgaaaacccagtcctggcaggaagcggcctggtggagcgaagtcttcagctatgcagaagatcgctttaatctgccgcgcggcgccatcaaggcgacgttgctgattgaaacgctgcccgccgtgttccagatggacgaaatccttcacgcgctgcgcgaccatattgttggtctgaactgcggtcgctgggattacatcttcagctatatcaaaacgttgaaaaactatcccgatcgtgtcctgccagacagacaggccgtgacgatggataaaccattcctgaatgcttactcacgcctgctgattaaaacctgccataaacgcggtgcttttgcgatgggcggcatggcagcgtttattccgagcaaagatgaagagcgtaataaccaggtgctcaacaaagtaaaagcggataaagcgctggaagtcaataacggtcacgatggcacatggatcgctcacccaggccttgcggacacggcaatggcggtattcaacgacattctcggctcccgtaaaaatcagcttgaagtattgcgcgaacaagacgcgccgattactgccgatcagctgctggcaccttgtgacggtgaacgcaccgaagaaggtatgcgcgccaacattcgcgtggctgtgcagtacatcgaagcgtggatctccggcaacggctgcgtgccgatttatggcctgatggaagatgcggcgacggctgaaatttcccgtacctcgatctggcagtggatccatcatcaaaaaacgttgagcaatggcaaaccggtgaccaaagccttgttccgctagatgctgggcgaagagatgaaagtcattgccagcgaactgggcgaagaacgtttctcccagggccgttttgacgatgccgcacgcttgatggaacagatcaccacttccgatgagttaattgatttcctgaccctgccaggctaccgcctgttagcgtaaaccaccacataactatggagcatctgcacatgaaaacccgtacacaacaaattgaagaattacagaaagagtggactcaaccgcgttgggaaggcattactcgcccatacagtgcggaagatgtggtgaaattacgcggttcagtcaatcctgaatgcacgctggcgcaactgggcgcagcgaaaatgtggcgtctgctgcacggtgagtcgaaaaaaggctacatcaacagcctcggtgcactgactggcggtcaggcgctgcaacaggcgaaagcgggtattgaagcagtctatctgtcgggatggcaggtagcggcggacgctaacctggcggccagcatgtatccggatcagtcgctctatccggcaaactcggtgccagctgtggtggagcggatcaacaacaccttccgtcgtgccgatcagatccaatggtccgcgggcattgagccgggcgatccgcgctatgtcgattacttcctgccgatcgttgccgatgcggaagccggttttggcggtgtcctgaatgcctttgaactgatgaaagcgatgattgaagccggtgcagcggcagttcacttcgaagatcagctggcgtcagtgaagaaatgcggtcacatgggcggcaaagttttggtgccaactcaagaagctattcagaaactggtcgcggcgcgtctggcagctgacgtgacgggcgttccaaccctactggttgctcgtaccgatgccgatgcagcggatctgatcacctccgattgcgacccgtatgacagcgaatttattaccggcgagcgtaccagtgaaggcttcttccgtactcatgcgggcattgagcaagcgatcagccgtggcctggcgtatgcgccatatgctgacctggtctggtgtgaaacctccacgccggatctggaactggcgcgtcgctttgcacaagctatccacgcgaaatatccgggcaaactgctggcttataactgctcgccgtcgttcaactggcagaaaaacctcgacgacaaaactattgccagcttccagcagcagctgtcggatatgggctacaagttccagttcatcaccctggcaggtatccacagcatgtggttcaacatgtttgacctggcaaacgcctatgcccagggcgagggtatgaagcactacgttgagaaagtgcagcagccggaatttgccgctataccttcgtatctcaccagcaggaagtgggtacaggttacttcgataaagtgacgactattattcagggcggcacgtcttcagtcaccgcgctgaccggctccactgaagaatcgcagttctaagcaaccgacggtaatgactccaacttattgatagtgttttatgttcagataatgcccgatgactttgtcatgcagctccaccgattttgagaacgacagcgacttccgtcccagccgtgccaggtgctgcctcagattcaggttatgccgctcaattcgctgcgtatatcgcttgctgattacgtgcagctttcccttcaggcgggattcatacagcggccagccatccgtcatccatatcaccacgtcaaagggtgacagcaggctcataagacgccccagcgtcgccatagtgcgttcaccgaatacgtgcgcaacaaccgtcttccggagactgtcatacgcgtaaaacagccagcgctggcgcgatttagccccgacatagccccactgttcgtccatttccgcgcagacgatgacatcactgcccggctgtatgcgcgaggttaccgactgcggcctgagttttttaagtgacgtaaaatcgtgttgaggccaacgcccataatgcgtgcagttgcccggcatccaacgccattcatggccatatcaatgattttctggtgcgtaccgggttgagaagcggtgtaagtgaactgcagttgccatgttttacggcagtgagagcagagatagcgctgatgtccggcagtgcttttgccgttacgcaccaccccgtcagtagctgaacaggagggacagctgatagaaacagaagccactggagcacctcaaaaacaccatcatacactaaatcagtaagttggcagcatcacccacagatccttttaatatcaatagctgttctttcggaagtgctggaattattgcaacagattggttaataacatgatcatttgaccatttcaggaggctataatctacattcataaaatccatcagagaatagtgtttaatatcctctttgctttcgctcatgattcttattttgtcgttagttacattaggatcataaaccgaaaccacgtaatgggtacatccttcagttgtgttctttattcttagccggaccgtcaaagcatggttatccaccagtaatatggctgccataacactgatgccatttgattccatcttgtcaaaatatgctttcataactagcccgaaatcaccgcaggcagcaacgcaacgcccctcaggacggctggaaatcaacgccaaagtctggtttttgcattttttgttgaagtgagtgagaaatttttcagctgaagaataatcatcttgatggggtttgtaatcaacattctgataaatatcattaatatattgtgcagcaatgtgtcggcatactatacggttttggggtcgccccggaaaataacattgaccattaagtttaattcttgggaattctttttcttttctatctgattttaggtttaattcttgtttatcaagagtgtctgagcgttgaggtaaaatttccattaggtattcttcaaatattggagcaatggtttgagtgagtgtcgtgttttcgttttattaattatcgtaatttctttcttatcagcttgtaagacggacgtggaaaatttaatgacaaaatccttgttgctaaagatatgacgaccattttgtctacagttctctgagaagctttttaatagaggcgtcgccagctccttgccagaaaatttatcctcgagttctttataaaacaattcactcagggtttggtgttcatttgtctgggctgtattattaatatttgcagagaaagaactacgaggaatacgagtaatcatttaaatatctcattgtttattgatgtcttaaattttaactatcagaacagtgaaaaaatttaatatgattacaactaaagaaatatcataaatcgctcaatctcataatgcagccgtaaaagtttcggtggaatgagatcttgcgattttgttaataattaagtggtttgatgtttaaaaataatgctgagttaataaaagtgtgtgaagtgtatgacattaagttattttggcgtcaatgcgattaacagacacccttattctattgccactcaggtatgatgggcagaatattgcctctgcccgccagaaaaagtcagcgcattccaccgtacgccagcgtcacttccttcgccgctttaatcaccatcgcgccaaactcggtcacgcggtcatcggtaatacgtgaaatcggtccggaaatagaaattgcggcaaacggttcacggtgctcatcgaaaatacacgctgcaaggcaacgtagccccagtgcatgttcctcatcgtcaaatgaatagccccgtttgcgcgtttgggcgagatcttcttttaaatgcacaggagacaccagcgttgcgtgggtataggcatgtaaccctttgcggtgcagcagcttcgtcacctgttcttcgctcagttgggctaaaaaggctttacctgcaccggaagcgtgcatcggcaatttaccgccgataggtgcggacatacgcatcaggtgagtacactgtacctgatcgataataatcgcttcgtgatcgctttgatcaagcaccgccatattgaccgtttcgccagactcttccattagattgcgcaggatagggtgaacaatcgctaacaaattacggctctggagaaagctgctgccgaccataaaggcatgtgcgccgattgcccagtgtcccagttcgccaacctgacgcacgaaaccctgctgttgcatcgtggttagcaggcggtgggtcgtggaattgggtaacccggcttgttgcgccagttccgtgagtgccacactgccattggattcggcaatccactccagtaatttcaggccacgcgttaaagactgaacctgtccagtcgctggtgcggtggcaacggcgggttttctgccgcgtttcgcgggaatgggtgcgaccatgacagtctcctttttctgtatcgtggaaatcattttcatttttattgttagttaatgcaatagttgctgaactgatccgatgagttaatgttgaacaaatctcatgttgcgtggtggtcgcttttaccacagatgcgtttatgccagtatggtttgttgaatttttattaaatctgggttgagcgtgtcgggagcaagtgtgagcagcaaagtggaacaactgcgtgcgcagttaaatgaacgtattctggtgctggacggcggtatgggcaccatgatccagagctatcgactgaacgaagccgattttcgtggtgaacgctttgccgactggccatgcgacctcaaaggcaacaacgacctgctggtactcagtaaaccggaagtgatcgccgctatccacaacgcctactttgaagcgggcgcggatatcatcgaaaccaacaccttcaactccacgaccattgcgatggcggattaccagatggaatccctgtcggcggaaatcaactttgcggcggcgaaactggcgcgcgcctgtgctgacgagtggaccgcgcgcacgccggagaaaccgcgctacgttgccggtgttctcggcccaaccaaccgcacggcgtctatttctccggacgtcaacgatccggcatttcgtaatatcacttttgacgggctggtggcggcttatcgagagtccaccaaagcgctggtggaaggtggtgcggatctgatcctgattgaaaccgttttcgacacccttaacgccaaagcggcggtatttgcggtaaaaacggagtttgaaacgctgggcgttgagctgccgattatgatctctggcaccatcaccgacgcctccgggcgcacgctctccgggcagaccaccgaagcattttacaactcattgcgccacgccgaagcgctgacctttggcctgaactgtgcgctggggcccgatgaactgcgccagtacgtgcaggagctgtcacggattgcggaatgctacgtcaccgcgcacccgaacgccgggctacccaacgcctttggtgagtacgatctcgacgccgacacgatggcaaaacaaatacgtgaatgggcggaagcgggctttctcaatatcgtcggcggctgctgtggcaccacgccacaacatattgcagcgatgagtcgtgcagtagaaggattagcgccgcgcaaactgccggaaatccccgtagcctgccgtttgtccggcctggagccgctgaacattggcgaagatagcctgtttgtgaacgtgggtgaacgcaccaacgtcaccggttccgctaagttcaagcgcctgatcaaagaagagaaatacagcgaggcactggatgtggcccgccagcaggtggaaaacggcgcgcagattatcgatatcaatatggatgaagggatgctcgacgccgaagcggcgatggtgcgttttctcaatctgattgccggtgaaccggatatcgctcgcgtgccgattatgatcgactcctcaaaatgggaggtcatcgaaaaggggctgaagtgtattcagggcaaaggcattgttaactctatctcaatgaaagagggcgtcgacgcctttatccatcatgcgaaactgttgcgtcgttacggtgcagcggtggtggtaatggcctttgacgaacagggacaggccgatacccgcgcacggaaaatcgagatttgccgtcgggcgtacaaaatcctcaccgaagaggttggcttcccgccagaagatatcatcttcgacccgaacatcttcgcggtcgccaccggcattgaagagcacaacaactatgcgcaggactttatcggcgcctgcgaagacatcaaacgcgaactgccgcacgcgctgatttccggcggcgtatctaacgtttctttctcattccgtggcaacgaaccggtgcgcgaagccattcacgcggtgttcctctactacgctattcgcaatggcatggatatggggatcgtcaacgccgggcaactggcgatttacgacgacctgcccgctgaactgcgcgacgcggtggaagatgtgattcttaatcgtcgcgatgatggcactgaacgtttactggagcttgccgagaaatatcgcggcagcaaaaccgacgacaccgctaacgcccagcaggcggagtggcgctcgtgggaagtgaataaacgtctggaatactcgctggtcaaaggcattactgagtttatcgagcaggataccgaagaagcccgccagcaggctacgcgcccgattgaagtgattgaaggcccgttgatggacggcatgaacgtggtcggcgatctgtttggcgaggggaaaatgttcctgccacaggtggtcaaatcggcgcgcgtcatgaaacaggcagtggcctacctcgaaccgtttattgaagccagcaaagagcagggcaaaaccaacggcaagatggtgatcgccaccgtgaagggcgacgtccacgacatcggtaaaaatatcgttggtgtggtgctgcaatgtaacaactacgaaattgtcgatctcggcgttatggtgcctgcggaaaaaattctccgtaccgctaaagaagtgaatgctgatctgattggactttcggggcttatcacgccgtcgctggacgagatggttaacgtggcgaaagagatggagcgtcagggcttcaccattccgttactgatcggtggcgcgacgacctcaaaagcgcacacggcggtgaaaattgagcagaactacagcggcccgacggtgtatgtgcagaatgcctcgcgcaccgttggtgtggtggcggcgctgctttccgatactcagcgcgatgattttgtcgctcgtacccgcaaggagtatgaaaccgtacgtattcagcacgggcgcaagaaaccgcgcacaccaccggtcacgctggaagcggcgcgcgataacgacttcgcttttgactggcaggcttacacgccgccggtggcgcaccgtctcggcgtgcaggaagttgaagccagcatcgaaactctgcgtaattacatcgactggacaccgttctttatgacctggtcgctggccgggaagtatccgcgcattctggaagatgaagtggtgggcgttgaggcgcagcggctgtttaaagacgccaacgacatgctggataaattaagcgccgagaaaacgctgaatccgcgtggcgtggtgggcttgttcccggcaaaccgtgtgggcgatgacattgaaatctaccgtgacgaaacgcgcacccatgtgatcaacgtcagccaccatctgcgtcaacagaccgaaaaaacgggattcgctaactactgtctcgctgacttcgttgcgccgaagctttctggtaaagcagattacatcggcgcatttgccgtgactggcgggctggaagaggacgcactggctgatgcctttgaagcgcagcacgatgattacaacaaaatcatggtgaaagcgcttgccgaccgtttagccgaagcctttgcggagtatctccatgagcgtgtgcgtaaagtctactggggctatgcgccgaacgagaacctcagcaacgaagaactgatccgcgaaaactaccagggcatccgtccggcaccgggctacccggcctgcccggaacatacggaaaaagccaccatctgggagctgctggaagtggaaaaacatactggcatgaaactcacagaatctttcgccatgtggcctggtgcatcggtttcgggttggtatttcagccacccggacagcaagtactacgcggtggcgcaaattcagcgcgatcaggttgaagactatgcccgccgtaaaggtatgagcgtctccgatgttgagcgctggctggcaccgaatctggggtatgacgcggactgattcacaaatctgtcacttttccttacaacaaacagggcgctcaatgagtgccctgtctctttattaatatgaaacacttatactggaaacaggctggaataatcttagccggaaaaacgaatgtcaaaaggcacagtaaagatgccagtcagcgtgtttccggtcctttggtcattcaattgcttcaggaacatataacgataaggagaacctgaactcgtgttaacgctgcttcacctgctttctgccgtcgccctgctggtctgggggactcatattgttcgaaccggcgtaatgcgcgtcttcggcgcgcgtttgcgtactgtccttagccggagcgtcgaaaaaaagccgctcgccttttgcgcggggatcggcgttaccgcactggtacagagcagtaatgccaccaccatgctggtgacctcgttcgtcgctcaggatctggtagccctcgcaccggctctggtgattgtgctgggtgcagatgtcgggacggcgctaatggcgcgtattctcaccttcgacttatcctggctgtcaccgttacttatttttatcggcgtgatttttttcctcggacgcaaacagtcacgcgccgggcaactgggccgcgtcggtattggtcttgggctgattttgctggcgctggagttgattgtgcaggccgtaacgccgatcacccaggcaaacggcgttcaggtgatctttgcctcgctgaccggcgatattctgctggatgcgctgattggcgcgatgttcgccattatcagctactccagccttgctgctgtactgctgaccgcgactctgaccgccgcaggcattatctccttccccgtggcgctctgtctggtgattggtgctaacctcggttccggcctgctggcgatgctcaacaacagtgccgccaatgccgcagcccgccgtgtcgcgctgggtagtttgctgtttaagctggtgggtagcctgattatcctgccgtttgtccatttgctggcagagacaatggggaagttgtcattgccaaaagcggaactggtgatctatttccacgtcttctacaaccttgtacgttgcctggtcatgctgccatttgttgacccgatggcacggttttgcaaaacgattattcgcgatgaaccggaactggatacccagctacggcctaaacatctggatgtcagcgcgctggatacgcccacgcttgctctggcgaacgccgcgcgcgaaaccctgcgcattggcgacgccatggaacagatgatggaagggctgaataaagtgatgcacggcgagccacggcaggagaaagagctgcgtaagctggcagatgatatcaacgttctctacaccgccattaagctgtatctggcgcgaatgccaaaagaggaactggcagaagaagagtcgcgtcgctgggcggagattattgaaatgtcgctcaaccttgaacaggcttccgatatcgtcgagcgcatgggcagcgaaattgctgataaatcgctggcagcacggcgggcattttcgcttgatgggttgaaggaactggatgcgctctatgagcaattgctcagtaatttaaagctggcaatgtcggtgttcttctctggcgatgtcaccagcgctcgtcgtttgcgccgcagcaagcatcgctttcgcattcttaatcgccgctattcccacgcccacgtcgatcgcctgcatcagcaaaacgtgcagagcattgaaaccagttcgctacatttaggcttactgggagatatgcagcgtctgaactcgctgttttgttcggtggcttacagtgtgctggaacagccggatgaagatgaaggacgggacgagtattaatattgtgaatcctgtaggcctgataagacgcgtcaagcgtcgcatcaggcactatgaacaagatgccggatcatgcatccggcaattcacttaaaaacggtgacccgcttccagcggcaccgcttcttcaccggccttaaacacataagtggtgttcgggccacccagcgtagcgtgacctttactcaccgtgatccagttaccttccggtagaccaataatcgtcagttctggcgcgacgaccagcagttcgcgaatacgctgctcacgggtttcacctttatggccttccggcagcgcgttggtgaagtgcgggttgatttgcagcgggaacagatttagcgcatcgaaaccttgcggatcgacaatcggcatatcgttggtggtacgaatggttgggcaagcaaggttagcgcctgcgctccagccaatatacagcgcaccacgtttaaccacgtcagtaattggtgccagcagcccgcgctcgcggcactgtttcagcaactggaaagtattcccgcccccgacaatcacgatctcagcattttcaatcgcggcaacgggatcgacaacgctatgaataccggtgacagaaacacccagcggagcgagaaccgcagccgttttcgctgtgtaatcatcccaggtctgcgttacgccagcgaaagggataaacaccgctgagcggcgaccctgcaactgttcagcaattagcggcagtgcatgttccagccaggctttacccggcagcgtcgagttactcaataaaagcagttccattacttctccggttagtaagaaatcacggaaggcatgctaccactgcgaatttaaccacttactgacatggctcacgatgtcacgtattgcaccgggcgctgagactgatgacaaacacagcattgcctgatgcgctacgcttaccaggcctaccagataactgcaatatattgaattttcgagattatgtaggccgaataaggctttattccgcatccggcataaacaatgtgtactttgccaccaatttgagcgccccttaaggcgctgatgtttttttatccttctcgtgcacattgggccgcttcagcaatcagccgcacatcaggtcgcgaagttgccgcggcgaccagccagcgacatgcagagttaagtagcgcgattaatcatgggaaattgcctctgcatgagtgagcagatattgctccgcctcaccggaccagatcccctgatgacgcgccagaatcgccgccagtgcttgatcctgaatctgcgtgagtgacgtcagcggcaggtatttcccggtatacaccagctttttgccgccgccgacggcaggcaattcaagcgtggtttcgcccgcggcattcagcccaagaatatgtgttaccacttttgcggcctgcacttttttctcttcaatcagtttgaccgccgcgcgcatgtcgtcggtattgccgcctgacgtgcccacgtagtgggtaaatgcataatgcacatcgtagaaattaattggcgcgctgaaatgtttatcctgcggtccggcgaagaaattcaggcaaccatctgtcgccagcaaggaagaggcgagagtcaccagtccttcattaggcacaaagacgaaaatatcatcgaagccgtgaccgccactcagcgccattaacgtatcaaatgctgcatcggtggcattgagataatgaatcagtgtttgcggttctgatggatagtgcttgcgcgcataactcaatttgtcgttgtcggtatcggtaatgacgagcagcgacgggttaactggtccatgcagcgcataatcaatcgccaacaatcccattggtccggtgccgccgaggatcagcgtgcgcccttgcgggcgaatccccatcgtgtggttataactaccttcctgaagatgatagttggcgttgaacgcgccaatcacgcaggaaagcggttcaaccagcgagccttcaaaataggtttcgccgtcgtatgccagcaggcaatcttgttccatgacctcgttgggaataaccacatgcgtggcttcgccgcccacccacgggaaggagtagccggggcagtccgggcggtcagggagtttcaggttggcctgaatcacataacgctgacccggctggaatttgtgctgccactttttacccacggccagaatatcgccgcaaaactcgtggccgatgatgattgggttggtcgccacatcgtcgggtacttttttatggttttcacccaggttgcctctttccaggaagagaggcacaggctgtcagtgaccaccgtcgcgaggatttcatcctcctgcatttcaggaaggtcaaaggtttccaggcgtaaatcacgtttaccataaagacgcagagctgttgttttcataaaccacctcatgttgagcgatggccccggcagtcgtgccggggcgaagaatcaggacaggaagcccagcgcattgccgataatccctaagccaaacagggcgaaaatcagccataccgggttaatttttttgttgagcagacgaaccatcagtagcgtcagaccgagcgccagcaaaccagggcaaagttggtcgagaatgttctgcacggtcatgatgacggtggagccatcggcggcatgcgtttgtgaaaccaccaacggtacgttgattgacgtccatttggtgaccagcacgcccatcacaaacagtccgagaatcgacgcgccttcggtgagtttttgcagcacattcccgcccatatcgctgacgatattcacccctttgcgaaagccgagctgtaggccataccacttcatcgccagacgcaccgcattgaaaataaagaaaaacagcagcgggccgaggatgttgccagaaagtgccagagatgcgccgagcgcagcggtaatcgggcgcagcgttccccagaccagtggatcgccaactcctgccaatggtcccatcagaccgactttgatgccgttaatggtaccgtcatcaatttccgcgccgttggcccgcgcctcttccatggcggcagtgacgccgatgaccgggccacatacggctggcgtggtattgaagaacaccaggtgtcgcctgagcgccgcaacctgatcctcttttaatgggtaaagtcgcttgatggcggggatcatgtcgtagcaaaagcccagtccgtgaatacgttcaaagttaaaggacgcctgttgcaggttggagcgcagaaacatgctcaccagatcgctgcgtgtaatttttctctgttccatgatggctccgttaatcgtcaagttggtcaagggcggtggaggcggtggcctggagttgaggttcagctttacgccactgtggatttagctggatgtagaccagggccatgatcacgccgacgccaccgaacgccagcaggctgagatcgaggtagccacctgcgaggaaaccgaggaaaaagaaaggcatcaaatatttcacgcccatcatacgtagcaccatggcgtaaccgaccaccacgataaaaccgccagcaatttgcagtccacgggtcacaaattcgggaatggcgtttaacatattgctgaccatatcggcgctgacgaacagtgagacaatcagtgccggaatagcaacgcgcagcgcctgcacgccaagcgcggagacatgcagaatatcgagagtgcgaaaccgcgcctcttccgctgctttatccgccgcgtgctggaacactacggtgatggtacgggcaaacaccgtcagcacttggcctgccgcagccacaggcaacgcgatggcgattccggtggcgatgctttgctgaccaacgataaccagaatggcggagattatgctggcgagtgcagaatccggagattgcgccgcgccgacgttcatccagccgagagctatcaattccagcgtaccaccgagtattattccggtttttaaatcaccgagaattaaaccaatcaccgtacaggcaattaacgggcgatgagtctgaaattcatccagcacgctgcccattccggcaatacaggaaaaaagaaatatagcaataatttgtagggtacttatttccatgatttgtcaccttttaagtgtcgtcatccctgcctgttaaagcatatgtacacaggcgctattatttaatttgcgattaactgttcgtttattttgtcgataatattgattgagggatctgacgctacgacgcgtaaatccattatgacgccaagattatttaactcatgaaatgcgttaatatcatcatcatctaatgaaaccgctttggttaactgttttttaccgggccgccaggccatgccgccaatattcagggtgcctatttttaccccctggcgaaccatcgctaaggcatcctgtgggcgagtgaaaagataaaaaacggtttcgtcctaatattgcgggttgtgataaaccgcgacggctttttcaatattgaccacgttaaccttcattcccggtggcgcagcctgacgcaataatgtccggcgcacttcatcgttataaacttcgtcattgcagataataatgcgctgggcgttagccactttcgaccagacggtagtgacctggccgtggatcagacggtcatcaatgcgggcgagcgtaatgttcatcagaaatcttcctctgccgttgccagttgtttccagacaacgcaggtttgctttgcgatttgcgtcaggtgttcacacagttcatcaacattcatgctgtcctggttatcaaccagttcgagcgccagcggcagggaaaggccgctgattacccgcagacgaggattgcgcatcgcaagcatcgctgccgcattccacgggctgccgcactgtaaatccacggcaatcagccactcatcttgattgtgaatgcttactaacttttccagctttgctacgatgtctccggcgttctcgcctggtacaaattcaaccgcctcgacattggcgtcgccgtacaccatctgaaccgattccagcatggcgcaagctaatttgccgtgggcacaaaaaatggcgttgaccataaagcctccttatccgcgcgttttgccgcccgcaatgttagtggttactccggtgatgtagctggcgcgttcagacagcagataacaaacaaaatcagcgacttctgctaatcttccggcgcgcccaataggaatggcgtttttggtatagccttcacgcagctgctcgacggtgatattgcgcgtccacgccagcgcctcttcatattccggcgtgcgtagcccggttttttccagaatccccggcgcgataccgaccacacggataccgtgtttacccagctctttcgaccaggagcgcgtgaagctattgagcgcggctttggtagcggcgtaacagctttggccttctgagccttccagtccactttctgaggaaacattcacaatcacgccatcatgttgtttgaccatctggcgcgccaccgcctgcgacatcagaaaaacgcctttttggttgatattgaccattttttcgaatgcagcttcgttgagttcatactgcccggcaggcgctttctcatcgaccagcagacgcgggaaattgaccccggcgttattgaccagaccgtcgatgcgaccaaaacgctggataatttccgctaccgtatgatttacctctttggcgctggaaatatcggtcggccaaaactgatagcctttatgaacttcatattgaccatcgccaccgtgaatatctaccatctgtacgtttgcgccttgtgctaataattcctctacaatcgccagaccaataccggatgcgccgccggtgacgataatgattttatcctgcaaatttaaccacgtttgcataacagactcctgattttagataatagggacccgccgtaatttttattacggtaaacatcgggaagatttttatttcagtaatagttcagctgtgctgctattcgttaccagacaattaatatattttccacgcagtgcaccaacaattccgctgtatttttcttcactcatggcaatgccaatggaataccgcgcctgctttcaggtcgtcactctcttcaccaccataaaacgcatgccagttagcgccgtcgcgaatggccggtgagccaattcccaccagggcgacatccagattatcccagtaggcagagatggttttaaagtgctgagactgcatgatcccattacgaattaaggggttatccagcagagccggaaaatccgcgagatgcgattcccctttcagcttcgctgccacgctgtaggttaatgtgtttacgtgatagcggctttcgagtttaccggacggtccgccaataattggcacgcagattaactgccgcgattgccccgcttgcggcaagttttcaaccagtgcgctcaccgcgcgaccctaggaaaaaccgacaatatcgccaggctccagcaagcgatccagcagttgcgcgccgtgtaaccccatcatcgccagttgagtctcttcatcctcatcatttcccgacaccaccacaacgtctttcaagccaaacttttgcttcagttgctgctccagccagagattttcgttgtagtcatagttgatggcgatggtgacaattccctgatcgcggcctcgtttaagcaagcggctgatggtggtgcggtaaatacccagttcgcgcgcgatttgcgcctgcgtcatatcctgttcgtaatagagttgggcaatcttcacaatcaaacggatatcgtcactgttttccattgccgcctcctggttctgcacatttgtgcaaatacgctttctcaccgcttgatctgatataaccccattatgagggcctttcaaagcgatttttcactctttgcatggggagaaatagcgctttctcttgcacatttgtttctctgcgtagtagtcatcagcacaggtgtgcagcgattcgtaatatgttgattatccttattttgccaggcaaatttgcatcgtacttccggagacacttttgtgataaaaggcgtggcagatcacatttaatttcgacgttgccgcataaccctgtttttccccgctaagaggtacggtatattccgcgttttacaggagaatttatgctgcccgactcatcagtccgtttaaataaatacatcagcgaaagcggaatttgctcacgccgcgaagcggatcgctatatcgagcaaggcaatgtgttccttaatggcaagcgagccaccattggtgatcaggtgaaacccggcgacattgtgaaagtaaacggtcagttgattgagcctcgggaagccgaagatttggtacttatcgccctgaacaagcccgtcggtattgtcagcaccaccgaagatggcgagcgcgataacattgtcgatttcgttaaccacagcaaacgcgtgttcccgattggccgcctggataaagactcccaggggctgattttcctcaccaatcacggcgatctggtgaataagatcctccgtgcgggtaacgatcatgagaaagagtatctggtgacggtcgataaaccgattaccgatgaatttattcgtggtatgggggcgggagtgccgatcctcgggacggtgacgaaaaagtgcaaagtcaaaaaagaagcaccgtttgtcttccgcattaccctggtgcaggggttgaaccgtcagatccggcgcatgtgcgagcatttcggctatgaagtgaaaaagctggaacgtacgcgcattatgaacgtcagcttaagcggcattccgctgggagaatggcgcgatttaaccgacgacgagcttatcgatctctttaagctcattgaaaattcctcttccgaggcgaagcccaaagcgaaggccaaaccgaaaacagcgggcatcaaacgtccagtcgttaagatggaaaaaacggcggaaaaaggcggtcgcccggcgtccaacggtaagcgttttacctcgccggggcgtaaaaagaaggggcgctgattaacgcctcagactgatgaaaacggcccaaaagtgctcggacagtcccctcgccccttcgggaaaagggttagggtgaggggaaaattgtgttcacactgacgagtgaaaatctcaggcgttgattgttcattagcgcctgccgcgcgtcgacgtatttgctgaccagctaaatgacgcttcaggatccggtttataagcctgctttttcttcaattggcgggcttttttcgcttcagcctcacgctcgaccattaatttatcgatgtactctttcttaatgctgttggtttcggagttggtcagtacgcgaccatgcgcaatccgcgcccgatccagcagtgttttaagttcacgctgctcgcgttcagtcatctctttttgggtaatacgggggagtgccatgatggtgccctcagtgagccagagagttcagtgtacgggaattcgtttgcgagcagaactgataatattcattttgccttctcttaactatttatctctttcgataattaattagagatgcagataaaaaaattaaaggcaattattctcgataaagacgttggttaacagagtacaggctcgtttattgataagcatagtgacaagaaaatcaatacggcccgaaatatagcttccaggccatacagtatttactcaaacaaattactatgcagtttttgcaccacctgctcggcatcttcgccgggcaccaggaagcacaggttatggctggatgcgccgtaacaaatcatgcgaatgttgaacggttccagtacgccgaatacctctttgccaacgccgcaggcttttgacaggtcattgccaatcaacgcgaccagcgccagaccttcttctacttccacccggcacagtgcggaaagctccatcagcagagattgcgtcagcaacgtatcgccagtggaggttgaaccggtggtatcaagggttaatgccacgctcacttctgacgtggtgattaagtctaccgaaatattatgccgcgcgaggatgccgaaaacttccgcgaggaaaccgcgagaatgcagcatattcaggctgtgcaaagtgagcagagtctgattgcgacgaagcgccagcgcgcggaacagcggcggattttcagttttattgcacaccagcgtaccacctgcgcgtgggtctttgctggagccgacaaagaccgggatatcgctgcgtactgcgggtagcaacgttgccggatgcagtacttttgcaccaaaagttgccatctctgccgcttcggcaaacgcgatttcatcaatgcgttttgctgcggaaactacgcgtggatcggtggtgtagatgcccgggacgtcggtccagatatcaacacgagatgcgtgtaaagcctccgccagcaaggctgccgtataatcgctgcctccacggccaagcgtcgttgtacgacctttattttcgctaccgataaatccctgggtgatcactaagccttcattgaggcgtgggagcagctgcagcgcggccagttccgccagcgcggctacatctggctctgcacgaccaaatcggtcgttggtacgcatcactttacgtacatcaaaccactgtgcctgaacatcgcgttcgcgcaggatttcgacaaacagcagggtcgacatcagctcgccgtggctgaccagctcatctgtcagcgccggagacgttgccagcgccgccgcttctgccagaacagtaatgttctccagcagacgttcaatctcttcacggataacgttcgggtaacgcagacgttccagaatggcaaactggatgttgcgaatagcgtcgagtttttcgaatcgctcgccaggttccagcccttccgctaaagcgaccagcagattagtgataccagcagaagccgagaggactactaaacgcacgttggcatcagaaagcacaatatcagcgctgcggttcatggcgtcaaaatcagctacgctggtaccgccaaatttggagacaacaatttcagacataactacctcgtgtcaggggatccattttcagccttggcacaagggaagagcggaagacgggtgggcgcagagcgatacttcgctactattttcacccagaagtgctccaccacttgcgaaacgcccgactgcgaacgcttctggtgacaacccaggggattcagcccctgtagccgatgatgaacgtggccagccgttcaatcacctcggcgatgcaccccctcaggtgttatcacaggactggctcctccaacaccgttacttgggcaacgcgcctcttctggcctgcgctagcgcaggtagtacatttataaataaagggtgagcggggcggttgtcaacgacggggtcatgcggatttttcatccactcctggcggtcagtagttcagctaataaatgcttcactgcgctaagggtttacactcaacattacgctaacggcactaaaaccatcacatttttctgtgactggcgctacaatcttccaaagtcacaattctcaaaatcagaagagtattgctaatgaaaaacatcaatccaacgcagaccgctgcctggcaggcactacagaaacacttcgatgaaatgaaagacgttacgatcgccgatctttttgctaaagacggcgatcgtttttctaagttctccgcaacattcgacgatcagatgctggtggattactccaaaaaccgcatcactgaagagacgctggcgaaattacaggatctggcgaaagagtgcgatctggcgggcgcgattaagtcgatgttctctggcgagaagatcaaccgcactgaaaaccgcgccgtgctgcacgtagcgctgcgtaaccgtagcaataccccgattctggttgatggcaaagacgtaatgccggaagtcaacgcggtgctggagaagatgaaaaccttctcggaagcgattatctccggtgagtggaagggttataccggcaaagcaatcactgacgtagtgaacatcgggatcggtggttctgacctcggcccgtacatggtgaccgaagcactgcgtccgtacaaaaatcacctgaacatgcactttgtttctaacgtcgatgggactcacatcgctgaagtgctgaaaaaagtaaacccggaaaccacgctgttcctggtagcatctaaaaccttcaccactcaggaaactatgaccaacgcccatagcgcgcgtgactggttcctgaaagcggcaggtgatgaaaaacacgttgcaaaacactttgcggcgctttccaccaatgccaaagccgttggcgagtttggtattgatactgccaacatgttcgagttctgggactgggtcggcggccgttactctttgtggtcagcgattggcctgtcgattgttctctccatcggctttgataacttcgttgaactgctttctggcgcacacgcgatggacaagcatttctccaccacgcctgccgagaaaaacctgcctgtcctgctggcgctgattggcatctggtacaacaatttctttggtgcggaaactgaagcgattctgccgtatgaccagtatatgcaccgtttcgcggcgtacttccagcagggcaatatggagtccaacggtaagtatgttgaccgtaacggtaacgttgtggattaccagactggcccgattatctggggtgaaccaggcactaacggtcagcacgcgttctaccagctgatccaccagggaaccaaaatggtaccgtgcgatttcatcgccccggctatcacccataacccgctctctgatcaccaccagaaactgctgtctaacttcttcgcccagaccgaagcgctggcgtttggtaaatcccgcgaagtggttgagcaggaatatcgcgatcagggtaaagatccggcaacgcttgactacgtggtgccgttcaaagtgttcgaaggtaaccgcccgaccaactccatcctgctgcgcgaaatcactccgttcagcctgggtgcgttgattgcgctgtatgagcacaaaatctttactcagggcgtgatcctgaacatctttaccttcgaccagtggggcgtggagttgggtaaacaactggcgaaccgtattctgccagagctgaaagatgacaaagaaatcagcagccacgatagctcgaccaatggtctgattaaccgctataaagcgtggcgcggttaatcatcatgcgtgcctgatgccgatatgtaggccggataaggcgtttacgccgcatccggcaaccggagcctgatgccaatatcgacattaatgcatagtatgaggagttaaataaccttaaaaacaatgccgacaataagtcggcattgttttatcagataaatccccttgtctgtgatttaacggaaatcataccgtgaggttaatcctaaaatagatttttaatcgttgtttatttcggagaatacgcagattaattacttttgtttttattttaagtttatgatttttattgttatttaaatataagttgaaacttatatttgatattcattccaattatcctaaaacaccatcgctaattccccgcgccgtaattcgcatgctttagttgtgtatactcgatcccgcccgaaatgtttttgggtaaatctccattcattcaatgaagggaaattgttatgaaaaaagttctgtatggcatttttgccatatctgcgcttgcggcgacttctgtgtgggctgcacctgtacaggtgggcgaagcggcaggggcggcagcaacgtcggtttcggcggggagttcctccgcgaccagcgtcagcaccgtaagctcggcggtgggtgtcgcgctcgcggcaaccggtggcggtgatggttctaataccgggaccacaacaaccacaaccaccagtacccagtaataaagtatgtatccccaaaataattcgagtcattgcatctgtggcttgaaatatgaagggattaaccataaccacactccggtgtggttattctgcccctctggagaagagtcgtgaagcgacctgcactcattcttatctgcctgttattacaggcctgttcagccacgactaaagagctgggcaattcactgtgggacagtctgttcggcacgccaggcgtacagctgacggacgatgatattcaaaatatgccctacgccagccagtacatgcagcttaatggcgggccgcaattgtttgtggtgctggccttcgctgaagacggacaacaaaaatgggtcactcaggatcaagccactcttgtcacacaacatggtcgtctggtgaagactttgcttggcggcgacaacctgattgaagtgaataaccttgccgccgacccgctgattaaacccgcacaaattgttgatggtgcaacatggacgcgcacgatgggctggaccgagtaccagcaggtacgctacgccaccgcacgctcagtcttcaaatgggatggcaccgataccgtcaaggtcggcagcgatgaaaccctggttcgcgtgctggacgaagaagtctccaccgaccaggcgcgctggcataaccgctactggatcgacagcgaagggcaaattcgccagtcggaacagtatctcggcgcggattatttcccggtgaaaaccactctcatcaaggcggcaaaacaatgattaaacaaactattgtcgcgttgcttttgagtgtgggagcgtcatcggtcttcgcggcaggaaccgtcaaggtgttcagcaatggcagcagtgaggccaaaacgctaacgggcgcagagcatttaatcgatctggtagggcaacctcgactggcaaacagctggtggcctggtgcggtgattagcgaagagctggcaacggcggcagcattgcgtcagcagcaggcgttgctgacacggctggcagaacagggcgcagattccagcaccgacgatgccgccgccattaacgccttacgccagcaaatccaggcattggaagtgacaggcaggcaaaaaatcaatcttgatcccgatatcgtccgcgttgccgaacgcggtaacccgccgttgcagggcaactacacgctgtgggtcggaccaccgccgtccacggtcacgttgttcgggcttatcagccatcctggcaatcagccattcactccaggtcgcgacgtggcgagctatctctctgaccagagcctgctcagcggtgcggatcgcagctacgcgtgggtcgtttacccggacggacgcacgcaaaaagcgccggtggcttactggaacaagcgtcacgtagagccgatgcccggcagcattatttatgttggcctcgcagactccgtctggagtgagacgcctgatgcccttaacgccgacattcttcagactctgacgcagcggataccccaataatgaaaaaaagacatctgcttagcttactggcgctgggcattagcacagcttgctacggcgaaacatatcctgcgcccattggtccgtcgcagtcggatttcggtggcgtaggattattacaaactcccaccgcgcgtatggcacgggaaggggagttgagtctgaactatcgcgataacgatcagtaccgttattactcagcttcagtgcaactcttcccgtggctggaaacaacgctgcgttacaccgacgtgcgcacccggcagtacagcagcgtcgaagcgttctctggcgatcaaacgtataaagataaagccttcgatctcaaactgcgtttgtgggaagagagttactggctgccgcaagtggcggttggtgcgcgggatatcggcggtacggggctgtttgatgcggaatatcttgttgccagcaaagcctgggggccgttcgattttacgctcggcctgggctggggatatctgggcaccagcggtaatgtgaaaaatccgctctgttcagccagtgataaatattgctatcgcgataacagctacaaacaagcgggatctatcgacggcagtcagatgttccacggcccggcctcactgtttggcggcgtggaataccagacgccctggcaaccgctgcgcctgaaactggagtatgaaggtaataattatcagcaggattttgccgggaagctggagcaaaaaagtaagtttaacgtcggggcgatttatcgcgttaccgattgggccgacgttaaccttagctatgaacgtggcaacacctttatgtttggcgtcacgctgcgcaccaactttaacgatctgcgcccgtcctacatcgataacgcccgcccgcaatatcaaccgcagccgcaggatgccattttgcagcactcggtggtggcgaatcagttaacgttgctgaaatacaatgccggacttgccgatccgcagatccaggcgaaaggcgatacgctgtatgttaccggcgagcaggtgaaatatcgtgattcgcgcgaagggatcatccgtgctaatcggatcgtgatgaacgatctgccggatgggatcaaaacgatccgcattacggaaaatcgccttaacatgccgcaggtgacgacggaaaccgatgtcgccagcctgaaaaatcatctcgccggagagccgttgggccacgaaacgacgctggcgcaaaaacgcgtcgagccagtggttccgcagtccaccgagcagggctggtatatcgacaaatcacgctttgatttccatatcgatccggtgctgaaccagtcggtcggtggcccggaaaacttttacatgtatcagctgggcgtgatgggaacggcagatttgtggctgacggaccatctgctgaccatcggcagcctgtttgcaaatcttgccaacaactacgacaagtttaactacaccaatccgccacaggactcgcacttaccgcgcgttcgtacccatgtgcgcgagtatgtgcagaacgatgcctatgtgaataacctgcaagccaactacttccagcatctgggcaacggcttctacggtcaggtctatggaggttatctcgaaaccatgtttggcggtgcgggggctgaagtgttgtatcgtccgctggacagcaactgggcgtttggtctggatgccaactacgttaaacagcgcgactggcgtagtgcaaaagatatgatgaaattcaccgactacagcgtgaaaaccggacatctgaccgcctactggacgccatctttcgcccaggacgtgttagtgaaagccagcgtcgggcagtatctggcaggggataaaggcggcacgctggagatcgccaaacgctttgatagcggcgtggtggtgggtggctatgccacgatcacgaatgtttcaaaagaggagtacggcgaaggggacttcaccaaaggcgtgtatgtctcggtaccgttggatctcttctcgtctggcccgacacgcagccgtgcggcgattggctggacgccgctgacgcgtgacggtggtcagcaacttgggcgtaagttccagttgtatgatatgaccagcgaccgtagcgtcaatttccgctaagtcatgggaaaggtgccagttttcgcaatcactggcaccctcattcttaatggcctgttgagccatcaggaacgcagttcacccccggtttgcgatctggtgtgtaaaggcgaaaacattctgtcttcctgtccgtcgatatcggttgcaggtctggttgcctgagcgactgggccatcattgggctggagacattgctttgcggtaggtcggctttatcagcagtaccgagcggaccagcataagcaggaagaacagagactgataacatcaaagcagcaaaataaggcttcatttttaccacctttatcaggttacgtttcatttgttccagaggaacattgtcgatttttcgcgcattgctggtggctgggaatcacctgaatgggtgatttttgaattaccggcttgggtgcggtttgtcttgccggatgcgccgccaggcgcggcttatccggcctacgggtaggtatatccggctttggtggaggcgcgctccaaatccaggttgaacaaaacatacacaaaaaatatagatctccgtcacatttttgcgttatacaggaagctcgccactgtgaaggaggtactgctatgacgtcactctctcgtccgcgcgtggagtttatctccaccattttgcagaccgtactcaatcttggcctgctgtgcctcggcctgattttggttgtcttcctcggcaaagaaacggtgcatctggcagatgtgctgttcgcgccagaacaaaccagcaaatatgagctggtagaaggactggtggtttactttctctatttcgaatttatcgcgctgattgtgaagtactttcagtccggttttcacttcccgctacgttactttgtctatattgggatcaccgccattgtgcgcttgatcatcgtcgatcataaatcgccactggatgtgttgatctactcggctgcgatcctgttactggtgatcactctgtggctgtgtaattcgaaacggctgaagcgggagtaaaaagaaagcacgccgaactggcgcggcgtgctggacaggaagattacagcgtagcagtttgttgtgttttcttcgtttccggttcccagagggcttccagctcctcaagggttttacctttggtttccgggacaaatttccacataaatagtgctgccagaacgcccatacacccgtaaatccagtaggagaaaccgttgtggaaatgggccaccagccaggagtttttgtccatcatcgggaaggtccaggagacgaagtagttcgccagccactgggccgccaccgcgattgccagcgctttaccacgaatagcattcgggaagatttccgacagcagtacccagcataccggaccccaggacatggcaaaggcagcaacatagaacagcatcgacagtagcgccacaatacccggtgcctgagtgtaaaacgcggtaccgaggctaaacataccgattgccattccgagtgcgccgataatttgcagtggcttacgaccaaatttatccaccgtcataattgccagaacggtgaaggtgaggttgataactccgacaataatggtctgcaacagcgcgatatccgtgctggcccccagcgttttgaacacttccggcgcgtagtacagcaccacattgatgccgacaaattgctggaagatggagagcataacgccgatgacaatcacgcccacgccaaacatcagcagacgaccaccggttttgcggccatgatccagggagtgtttaatttcctgtactgcctgagttgcaagcgtgttgcccataattttgcgcaggatactttccgcctgttcttgcttgccgcgtgacatcagccagcgaggactttctggcacggtatacagcagcattaagaacagcagtgcagggatacattccgaggcaaacatataacgccagccgtcagtattcagccagctggcatcaccggaacgggcaataaaatagtttacgcagtaaactaaaagttgcccgaaaataatcgcaaactggttaaatgaaaccagttttccgcgaatatgagctggagccagttccgcaatatacattggtgaaagcattgaggctaaaccaacgccaataccgccaataatacgataaataacaaattccgggacataacctgccagataaataggtactgtgttgtccgggtttatagaggtaaaaccaagttctggccaggcagaacctacaccagaaataaaaaacaggacagcagcaatcttaagtgaatcacgacggccgaagcggttactgcaataaccaccgagggcaccgccgatgatgcaaccaatcagagcgctggctacgcaaaatcctaacagggagttggcagcggattcacttaagttttgtggagcaacaaagacggtattgagtgactcaacagtaccggaaataacggcggtgtcgtagccaaataataaaccacctaatgtagcgactaaggtaatcgaaaatatataactggaattatactgggtattcattcagacctgccttagaccattctgatcttttatcagtgcattgatgttggaattgtcaggcagttaaggcaattatcattttttacaatgcgtttacgtaatgtcttttctgtgatcttaattgtgataattatcaaaaattgatgaaaacaatactattgccgtgactcagagcacgaaagagaattatcgtaagtgggaaaacaaataacgtaaaaataataagctctatgatggaaatattaaccggcgaacgattcagattgcagacgaaagaaaaaaaggcgctccgtggagcgccgaataacagtcacaagttgggataacgtaagttgagggtgcagcggcataacattggcagaacaacatctttaacctttcacaccacctgccgtcaggccgttgaccagccagcgttgagccagcaagaagacgatggtgatcggtaatgcagacatcacggcagcggcggcaaagtcaccccacaggtagttttgcgggttgaggtattgctgcatccccacggccagggtgtagctgtttacgtcacgcagtaacagcgacgcgaccggaacttcagtaatggcagcgataaacgacaggatgaataccaccgccagaatcggtactgacagcggcaacaggacaaggcggaaggcctgccacggtgtcgcaccatccagcgcagccgcttcttccagcgaactatcgatggtttcgaaatagcctttgatggtccagacatgcagcgcaatcccacccagatacgcgaaaattacgccgccgtgagtattcaggccaatgaatggaatgtactcacccagacgatcaaacaacgcatacaacgcgaccagtgaaagtactgccgggaacatctggaaaatcagcattcctttcagcagcgtcgctttgcctggaaagcgcatacgggcgaaagcgtaggcgcaggtggtagagagcgcgacaatgccaatcgcggaaatcccggcgacctttaccgagttccatagccacagcagtaccgggaatggcggtggcgtaatgcgaccatcagcctgttccacgctaaaacctaaagccagtttccagtgatcccaggagatttgctccgggatcaggctgccgatcgcaaagttcccctggcgcagtgagatagcgacgaccatcagcagcgggaacataatcgccgcgataaaaagtagcagtagcaggtgagtaataaacaaacgtgctttttgcgatttcggttggaccattgccatttttgttatctcccttaatcaaacttcattcgcgtggctttcaggttcactatcgccagcgcacccaccagcaggaagagcagcgtggcaattgctgcagccagaccgaagtcctgacccccgccgccttcaaaagcgatacggtaggtgtagttaacaagcaggtcggtataaccggctggcgtggtcgtgccaagacgatccgggccgccgttggttaacagttgaatcagcacgaagttgttaaagttaaaggcgaagctggcgatcatcagcggcgtcagcggtttaatcagcagcggcagcgtaatcttaaagaagttctggaacggacctgcgccatccattgctgaggcttcatacaaatcgtccggaatcgctttcagcaagcccatgcagaggatcatcatgtacggataacccagccaggtattgacgataattagcatcgtgcgggcggtggtcggatcgctgaaccaggcgggcttcacgccaaacagcgcgctcaacatcatgttgatttcaccgaagctctggttaaacaaccctttgaaaatcaagattgaaatgaatgatggcaccgcgtagggcagaatcagcagaacgcgatagaccgctttgccgcgcaatgcttcccactgcaccagacatgccagaaccatgccgaccgccaccgttaaaaagacagtgatcagcgagaacaccacggtccagacgaaaatggcgaggaacggtttctgaatgccttcgtcggtgaagacgcgggtaaagtttttccagccagtagtcacggtgtaaccggggcttagcttttcatcaccccagttgccgtcggcggtaatggactggtaaaagccaatttggttattcggacgatatttcacgccgctctgattattcgtcaacgtgccgtcaccgtcgagtgtgtagagcggctgcgtgccagaaaactggcgcagggagctcatcatcactttgttgccatccggcagaatggcggtaatgtcactcagcgcctgacgattctgggtaatcacgcgtagattcgcgcgttcgccttcgggctgggcggtcgtttctttcagttgcagtttttgttcgccgccaaatttaaacgcgtcggagaggtaatttttgccgatttcgccgtcactgagcgccagttgccactcatcgcccgccgggtaaagaccaaagttataggttttgcctgcttgccaggagcgatctaacaacacttcctgcgcacattcaaaagtcagctggttagtgctgctgtagttggtgaaggcaatggcgatggtgcagaccagagggaagaggacgaataatcccattccagccattcccgggtaaacatagcgccaggcgtaggctttacgattggcgaaaatatacagccccgctgaactcaatatcagcgtggtaatggcgaacaggtattccccttgtgcgtacattaaaacaacaaggtaacccaccagcaggccgagcagacctagcactgaccatttcagcgcgtcgctttgccaccaatgtttctttttaatgacatccatggggttcttcctcattccaggacggataaggctttcacgccttatccgacaacaactgcctgatgcgacactgatgcgtcttatcaggcctacatgcgtttcagttttgtaggccggacaaggcgttcacgccgcatccggcatttcacagcattacttggtgatacgagtctgcgcgtctttcagggcttcatcgacagtctgacgaccgctggcggcgttgatcaccgcagtacgcacggcataccagaaagcggacatctgcgggatgttcggcatgatttcacctttctgggcgttttccatggtggcggcaatacgtggatctttcgccaactcttcctcgtaagacttcagcgccactgcacccagcggtttgtctttattgaccgcttccagaccttcgtcagtcagcagatagttttcgaggaactctttcgccagctctttgttcggactggcggcgttaataccggcgctcagcacgccaacgaacggtttagatggttgacccttgaaggtcggcagtaccgttacaccataattcactttgctggtgtcgatgttggaccatgcccacgggccgttgatggtcatcgctgtttcgcctttattaaaggcagcttctgcgatggagtaatcggtgtctgcattcatgtgtttgtttttaataaggtcaaccaggaaggtcagacccgctttcgcgccagcgttatccacggccacgtctttaatatcgtacttgccgttttcatacttgaacgcataacccccgtcagcagcaatcagcggccaggtgaagtacggttcttgcaggttgaacatcagcgcgctcttacctttcgctttcagttctttatccagcgccgggatctcttcccaggtttttggtgggttcggcagcagatctttgttataaatcagcgataacgcttcaacagcgatcgggtaagcaatcagcttgccgttgtaacgtacggcatcccaggtaaacggatacagcttgtcctggaacgctttgtccggggtgatttcagccaacaggccagattgagcgtagccaccaaaacggtcgtgcgcccagaagataatgtcagggccatcgccagttgccgcaacctgagggaatttctcttccagtttatccggatgctcaacggtgactttaattccggtatctttctcgaatttcttaccgacttcagcgagaccgttatagcctttatcgccgttaatccagattaccagtttaccttcttcgattttggcgagagccgaggcggaaaacatcatcgtcgttaatgcggataatgcgaggatgcgtgcacctgtttttattttcataatctatggtccttgttggtgaagtgctcgtgaaaacacctaaacggactctagtttctttatacggcaacctctttccatcctccttgcccctacgccccaccgttgctttgtgtgatctctgttacagaattggcggtaatgtggagatgcgcacataaaatcgccacgatttttgcaagcaacatcacgaaattccttacatgacctcggtttagttcacagaagccgtgttctcatcctcccgcctcctcccccataaaaaagccagggggtggaggatttaagccatctcctgatgacgcatagtcagcccatcatgaatgttgctgtcgatgacaggttgttacaaagggagaagggcatggcgagcgtacagctgcaaaatgtaacgaaagcctggggcgaggtcgtggtatcgaaagatatcaatctcgatatccatgaaggtgaattcgtggtgtttgtcggaccgtctggctgcggtaaatcgactttactgcgcatgattgccgggcttgagacgatcaccagcggcgacctgttcatcggtgagaaacggatgaatgacactccgccagcagaacgcggcgttggtatggtgtttcagtcttacgcgctctatccccacctgtcagtagcagaaaacatgtcatttggcctgaaactggctggcgcaaaaaaagaggtgattaaccaacgcgtcaaccaggtggcggaagtgctgcaactggcgcatttgctggatcgcaaaccgaaagcgctctccggtggtcagcgtcagcgtgtggcgattggccgtacgctggtggccgagccaagcgtatttttgctcgatgaaccgctctccaacctcgatgctgcactgcgtgtgcaaatgcgtatcgaaatctcccgtctgcataaacgcctgggccgcacaatgatttacgtcacccacgatcaggtcgaagcgatgacgctggccgacaaaatcgtggtgctggacgccggtcgcgtggcgcaggttgggaaaccgctggagctgtaccactatccggcagaccgttttgtcgccggatttatcggttcgccaaagatgaacttcctgccggtaaaagtgaccgccaccgcaatcgatcaagtgcaggtggagctgccgatgccaaatcgtcagcaagtctggctgccagttgaaagccgtgatgtccaggttggagccaatatgtcgctgggtattcgcccggaacatctactgccgagtgatatcgctgacgtcatccttgagggtgaagttcaggtcgtcgagcaactcggcaacgaaacccaaatccatatccagatcccttccattcgtcaaaacctggtgtaccgccagaacgacgtggtgttggtagaagaaggtgccacattcgctatcggcctgccgccagagcgttgccatctgttccgtgaggatggcactgcatgtcgtcgactgcataaggagccgggcgtttaagcaccccacaaaacacacaaagcctgtcacaggtgatgtgaaaaaagaaaagcaatgactcaggagatagaatgatgattactctgcgcaaacttcctctggcggttgccgtcgcagcgggcgtaatgtctgctcaggcaatggctgttgatttccacggctatgcacgttccggtattggctggacaggtagcggcggtgaacaacagtgtttccagactaccggtgctcaaagtaaataccgtcttggcaacgaatgtgaaacttatgctgaattaaaattgggtcaggaagtgtggaaagagggcgataagagcttctatttcgacactaacgtggcctattccgtcgcgcaacagaatgactgggaagctaccgatccggccttccgtgaagcaaacgtgcagggtaaaaacctgatcgaatggctgccaggttccaccatctgggcaggtaagcgcttctaccaacgtcatgacgttcatatgatcgacttctactactgggatatttctggtcctggtgccggtctggaaaacatcgatgttggcttcggtaaactctctctggcagcaacccgctcctctgaagctggtggttcttcctcttttgccagcaacaatatttatgactataccaacgaaaccgcgaacgacgttttcgatgtgcgtttagcgcagatggaaatcaacccgggcggcacattagaactgggtgtcgactacggtcgtgccaacctgcgtgataactatcgtctggttgatggcgcatcgaaagacggctggttattcactgctgaacatactcagagtgtcctgaagggctttaacaagtttgttgttcagtacgctactgactcgatgacctcgcagggtaaaggtctgtcgcagggttctggcgtcgcgtttgataacgaaaaatttgcctacaatatcaacaacaacggtcacatgctgcgtatcctcgaccacggtgcgatctccatgggcgacaactgggacatgatgtacgtgggtatgtaccaggatatcaactgggataacgacaacggcaccaagtggtggaccgtcggtattcgcccgatgtacaagtggacgccaatcatgagcaccgtgatggaaatcggctacgacaacgtcgaatcccagcgcaccggcgacaagaacaatcagtacaaaattaccctcgcacaacaatggcaggctggcgacagcatctggtcacgcccggctattcgtgtcttcgcaacctacgccaagtgggatgagaaatggggttacgactacaacggcgatagcaaggttaacccgaactacggcaaagccgttcctgctgatttcaacggcggcagcttcggtcgtggcgacagcgacgagtggaccttcggtgcccagatggaaatctggtggtaatagcaaaacctgggccggataaggcgtttacgccgcatccggcataaaaacaggttgtcattatctgaaaggggcgaaagcccctctgattatcgggtttagcgcgctattgcctggctaccgctgagctccagattttgaggtgaaaacaatgaaaatgaataaaagtctcatcgccctctgtttatcagcagggttactggcaagcgcgcctggaattagccttgccgatgttaactacgtaccgcaaaacaccagcgacgcgccagccattccatctgccgcgctgcaacaactcacctggacaccggtcgatcaatctaaaacccagaccacccaactggcgaccggcggccaacaactgaacgttcccggcatcagtggtccggttgctgcgtacagcgtcccggcaaacattggcgaactgaccctgacgctgaccagcgaagtgaacaaacaaaccagcgtttttgcgccgaacgtgctgattcttgatcagaacatgaccccatcagccttcttccccagcagttatttcacctaccaggaaccaggcgtgatgagtgcagatcggctggaaggcgttatgcgcctgacaccggcgttggggcagcaaaaactttatgttctggtctttaccacggaaaaagatctccagcagacgacccaactgctcgacccggctaaagcctatgccaaaggcgtcggtaactcgatcccggatattcccgatccggttgctcgtcataccagcgatggcttactgaaactgaaagtcaaaacgaactccagctccagcgtgttggtaggaccactatttggttcttccgctccagctccggttacggtaggcaacacggcggcaccagctgtggctgcacctgctccggtgccggtgaagaaaagcgagccgatgctcaacgacacggaaagttattttaataccgcgatcaaaaacgctgtcgcgaaaggtgatgttgataaggcgttaaaactgcttgatgaagctgaacgcctgggatcgacatctgcccgttccacctttatcagcagtgtaaaaggcaaggggtaattacgccccacagtgctgattttgcaacaactggtgcgtctcctggcgcacctttttttatgcttccttcctgggatatgagcgattttttatagtacttcacttcttcttcactaagaatgtccattatctcaatgccttatcagagattcttttcctttcgccggtagtgtctggacgctcaggctacttttccaggttattttatttctgtattacagaggttttatgataggtcatatcacaaattctggcggcaataactctttgatgaaacatgatgtggttcaaggaaataatatagtagatcttgatttactacgtaatttcaatggggtgacaggtttaaacagagataactttatttatatcagtgatatatttttaaatataaaacaacggaacgaaaaaatcatgcaataaatatgttacgtgaagtctcaattagtaatgatactataagtgtaaaattctacagaaatgaaaaaatagaatgcgcttgtaattttctgatggataaagatgcgcaggggtatatcgacctgtctgattttgatttaataaattgtcattttaaaggtgacgttatttctaaggtgtcttttttatcatcaaatctacaacatgtaactttcgaatgtaaagaaattgagaattgcaattttactaaggcaacagttgataatgtcatatttaaatgtcgacgtttacacaatgtgatttttctcaaaacgagtggcgaatgtgttgattttagccaaaatattcttgatacagttgacttctcgcagagtcaacttggtcatagtaatttatatgaacgcatcccgtttgcaaggcatccattgttttgacatgacgggtaggttgcagctttatatccggctttattgcagccgtaacgctgcgagcccctatgtaattcgccgactcaccccttattttcacggcggacttcaagcccaaaatactgttcaggtttagtgagtcacggtcttacctgtctttgtcatcactctggccgccatagcaacctttcagcattcacccttttgttaagagttcattgtttaatggtatcagcgattaatatggtctgatactgacgtggttcctgtcatacttacggtcatgggcggttatcgcccatactgttcgtgccagcttgtttgccatggcgacgattgccacactggctggacgacgttttttcagttcggttatccacgggccaggctctttagctactaatgccaccgctcttgcaccgtggataaataatgtcctgagataagtgtcaccacgtttgcttatccccagcagacgtactttccctccggagccagtttgttttggaaccagaccaacatatgcggcgaactctcgccccgatttaaacgctgatgcttcccccatggtggccaccgctgccgtcgcaataagtggtccaacgccaggaatatccagcaaccgcttacaggtttcattctgcctcgccacgctggtaagctgtttttcaatatcctctatcagtgagtccagctcattcagtcggttgtactggttttccagaaccataatgagatacggtggcagtctctctttcatccgttccagtgcttcggggaactcccgctccatcgctgcccggcctttgtggatggtttcaccaaactccagtaacgtcccgtgcagggcattaatttgtgcggtccggaacttcaccagttgcatgcgggtacggtgcagaaccagtaccgactgctgttcttctgtttttacggcgatttctttacccggctgctgaaccgccatccagatagcccgggcatccatcacatcattcttattgcccatgacgaatgccttaacgaagcgggcctgcaacaaccggactttatgaccaagttttgtcagttcccgtgcccagtgctgagaacctccacaggcctccataccaatcaggcatggctcacggttgccgaagaacgtcagaaaatcctgtctacgcaactgtttatcaaccacttcacctgtgtgctcattgatgaagtgaatctgaatgacatgttttgcgatatcaacgccaaccggtgtatatttcatttgtggagtctccagtctgagggagctttatgcatcccgtattgggcactatgatgccggaaatctgcgaggctccacacctgccagtttcacccttttaaccatcatactgctccgtgtttaattgtgtgggatgcgttcattacattttcgcgaatgtcagattagaaattcaaacttcgataattgttatctttacgcttcgcacttcaccagagcagagtttctgtctgccaaagaaatatcatttattaaatcgaatttgacagctgttatgtttgatcatgtgcgaatgtcgacagggaattttaaagattgcattacagaacaattggaattaactattgattattcagatatatttgggaatgaagatctcgatggttatatcaataacattataaaaatgattgatacattgccagataatgcaatgatattgaaatccgttctggcagtaaaactggtgatgcaattaaaaattctcaatattgttaataaaaactttattgagaatatgaaaaaaacatttagccattgtccttatataaaagatccaattatacgtagttatatacattctggggaagatgacaagttcgataattttatgcgtcaacatcgattcagtaaggtgaatttcgatacccaacagatgatccattttattaacagatttaatatgaataaagggctgattgataaaaataacaatttttttatccaacttatcgatcaggccttacgatcaacggatgatatgatcaaagcaaatgcctggtatctttataaagagtggattcgtagtgatgatgtttcacctatatttatagaaactgaagaaaagttaagaacctttaacactaataaattaacacgaaacgataatatatttatcctgttctcctctgtcgatgatgggcctgttatggtggtaagctcccagcgctgatatgactttccgtgtcaaaccggaatctctaattttgacgattttctttttaggtttaattccctgagggcgacgtagcagtaaatccgacggtgaatcacgctgatattcgcgggttggataccgcattacagaggtccgtcatatgagcctgccactttcttacgtcgcgaatcagctttgttccgccgtcgccaagcgctaacgtgggttactcttgtaccgggctacgtcgccttcagggaactggttattctcattttttatttgtgacattgtggttgttgtgcgacagacattgctattcggcccatatcccagataaaacccgccagctcacgtgcaacagcaacaattgtaatattgacattctttcctttggcctgaagttttcgatacctcttacaaagcctgagttgagcatcccatgctctgtcaatgacggggcggggtaaattttcctgccttttttgtattgccggactgatgcgtgccggatgacggtaactccacgctgcctcgaccaatagctttctggcatagctgtttccggctttggtaatgctgccctgatgtctgcttccacccgatgaatattctgatggcgtgataccaaaccatgacatcagttgtcgtggatgttcaaaacgggtcagatcacccagttcagaaattaatccaaccgcagtaataaactgaatccctcgcatggcttgcagcgcctctactaccggatacagcctccattcggtaacggcctccttcagggcggattccagccgttcacattgtgcctgccgatcttctattgtacgacggtgttcgtcaaaagctaattgtcgccagggactttcgaatgagtatttgctgagccagcgtcggtgtgcagggccccaatctgctcgcccgacataatggcccccatgaaccagaagaaacgatttcagacgttgccttgcatgccgtaaatcatcgcgggcagatgcccatgcccgggccaaatcccggaatgcctcatcttcaatgccgggtacgtagacagcagaaagatctcctgcacgcagtgaacgcacaagtctgatggcatcacggcgatcggttttaacccgctcccccggttttttcgggataagtgagggggcgcagaccatgcagtcaaaaccggatttcaccagccgacgataaagtccataaccacagggccccgcttcataaacgatactgacctgtgatgactttgacctgagacgtttacaaagattctgaatatcagtaggtgatgtgccaattttacccatcagttcaacaggttctgaattgatagcataagcgacagtaatcgattctttgtgaacatctaacccgacgtacaatgtgttattgttgttcatgctggcctccgtggtggaaataccggggtgtagcaacagctcacccatgcggctctgacaacgatgttaacccgcgttaaatatcccacgttggccagcatctgtctcacggaaagtcatactgccttacatgatatgttgaatcctacaaaagataccaattggaattccacgtgtatctataaatccagacataagatgttgcctattaatcttactcaggaaacactttttagctccaaatctcatggtaaatatgcgcttttcccaatttttactgcgagttggcgagctactcgtataaagaatataggtatttaagtaaaggaaaacatcaccgttcctggcatcatgggcggtgatgcccctacggttgccctcgccagcacgggcatcggcaaagcgtaaggttcaacagcgttttaccacttcatgcgattgttgcgtttttgttgcgcattagatcacttaatttgctttacatctcccgtaaacacttttctgcgatacaatgcctttacgttatgtaacggagagttcggcatgtcacaccccgcgttaacgcaactgcgtgcgctgcgctattttaaagagatccctgccctggattcgcaactgctcgactggctgttgctggaagattccatgacaaaacgttttgaacagcagggaaaaacggtgagcgtgacgatgatccgcgaagggtttgtcgagcagaatgaaatccccgaagaactgccgctgctgccgaaagagtctcgttactggttacgtgaaattttgttatgtgccgatggtgaaccgtggcttgccggtcgtaccgtcgttcctgtgtcaacgttaagcgggccggagctggcgttacaaaaattgggtaaaacgccgctaggacgctatctgttcacatcatcgacattaacccgggactttattgagataggccgtgatgccggactgtgggggcgacgttcccgcctgcgattaagcggtaaaccgctgttgctaacagaactgtttttaccggcgtcaccgttgtactaagaggaaaaaaatatggagtggagtctgacgcagaataagctgctggcgtttcatcgcttaatgcgtacggataagccaattggcgcgttactgctgctctggccaacattatgggcgttgtgggtggcgacaccgggcgttccccagctctggatcctggcggtgtttgtcgcgggtgtctggctgatgcgcgctgccggatgtgtggtgaatgattatgctgaccgcaagtttgatggtcatgttaagcgcacggcgaaccgaccgcttcccagcggcgcggtaacggagaaagaggcgcgcgcgctgtttgtagtgctggtattgatttcatttttactggtgctgacgctgaatacgatgaccattctgttgtcgattgccgctctggcgttggcgtgggtgtacccgtttatgaagcggtatacccatctcccgcaagtggtgctgggcgcggcgtttggctggtcgattccaatggcttttgccgctgtgagtgagtcggtgccattgagttgctggttaatgttcctcgccaatattctctgggcggtggcttacgacacgcagtatgcaatggttgaccgtgacgatgatgtgaagattggtattaaatccaccgcaatcctgttcggccaatacgataaattgattattggtattttgcagattggcgtactggcactgatggcgatcatcggtgagttaaatggcttaggctggggatattactggtcaattctggtggctggcgcgctgtttgtttatcaacaaaaactgattgccaaccgcgagcgtgaagcctgctttaaagcatttatgaataataactatgttggtctggtactgtttttaggactggcaatgagttactggcatttctgatgatgtaaaaaagccggatgatcatccggctttcttctgggttgcctgatgcgctgcgcttctcaggcctacacaacacatcgcaatttattgaatttgcagattatggaaggccggataaggcgttttcgccgcatccggcaattctctctgattacccttcgccctgcgtcgcactctcaatcgtcaaacgcacgtctgatgtaatcaactccgccagcaactgataaaccttcatcgtttctgccggttcggcgtcgccgctatcgctgatatacccttcatcacgcagcgtcagcaccagagaactgaacaccgccttgtcgaagaactccggcgcgttgatgccgtgcagcacggagagacgttgcgcaacggtgcggctctctttctccagcgtaccgcggttgatcgacgggttggcactcaacaaccagaaggtgatggcataacgttgcagcgtttcgcgcgcgcctgcggccagcagctgtagggggcgagaatgcgccgggttgatatgcaactcatcatcttgcagggtaatcagcccctgacgttgcatctcatttgccagcgcatcaataacgtccggcaactcgtcgcgatcccagcgcaggaacagctccgctttcagcattgggtaaagcacattgacgtgctccatcaatacgtcgcgggagatgtggcgatgctgggtgacaattgccgccatcagcgaaggcagcaccaacatatgcgcaatgttgttgcgatagtaggtcatcagcaccgcttgctcgcgcggcagaatgatgatgtcgccgatagtgtctttctcgacttcaaacttgttcatttgcagcgcgtgatcgataagctcgctggcgctggctgaaggaacggtagagtccgtggagtaaggtacgttgcgcatcagatccaggtagcagttgagttgctcggttaactgctcgcgggtgagtgagcgctgacgtgatgccagaagcgcagtacaacacaggttcatggcgtttgccgcgcctgcgttgttaatgcgtaccatcagatcggcagcaatattattgaccgtcggcgttaaccaggccggacgcaccgcttcgatgggatcgatagattcacgccagtctggtacgtgctggttaaggtaggtcatcaacggcattggttcaccgaagttgacgtaaccctgaccgagattacgcagcttgcttaaaccgcgcagcatctgcggcaggctctctttctctttcgtcgcgccgcgcagttctttggcgtaagtacccacttccatgacgtgctcataaccgatatagatcggaatcagcgtaatcggacgcgtgccgccacgcagcatcgcctgaatggtcatcgacagcgtaccggttttcggatccagcaaacgccccgtgcgggaacgaccgccttccacgaagtactcgacggaataaccacggctgaacagttcgccgagatactcacggaaaacggtggaataaagtttattgcctttaaaagtacggcgaataaagaacgcccccagacggcggaaaatcggcccggccggccagaagttcaggttgatcccggcggcgatatgcggcggcaccagcccctggtggtacagcacgtaagaaagtagcaggtagtccatgtgactgcggtggcaaggcacatacaccagctcatgaccgtcgtgggccagctggcgaacgcgctcggcgttatggacgttgatgccctgataaagtcggttccaggtgaagcccagaatgcggtcagtcaggcggatcatctcgtaagagaaattcgccgcaatctcttccatcagcgcaatcgcgttctgctgcgctttttcatgggagatttttttgctgcgcgcttcatcttctaccgctttggcaatggcgcgggaggcgagcagcttattaaacagatcctgacgagcaggcagacgtgggcctacggcagccagacgttgacgggcaaagtgcatacgcgccacgcgcgccagtttctgtgcgatagttttatccgtgccgtgttcatccgccatacggcgcagcgaaactgacggcgagaaacgcacaaaactgtcgcgaccgagccacagtacggcgaaaaatttctgtacgccgttaagcatacgcagcggcgggtttacttcgcctttttcacgccccggcgcgcgaccaaacatcaccgatactggcaccatctgcacatccagatttgggttgctacggtgcaaatcgagatagtcgtggaacagcttaatagactcttctttcggcgtgtaataggtgaatacacgcggcccgccgtgaatgaacacatagcgcggcagtagcgtgccgtcgatttctagcggctctaacgggtcaggcaagtcatgagccagacactgggcgcgtaacgtcagcaaatctgctttcgagttgtacggtaaaacgtacataattggacgagaggtatccagccccagttccggggcaggatctgccggaatagacttgctttttaccaggatgcttaatggtaaattcagtaatttgtagtaaattcgtggccagccggacataaacgatgtaaagcctctggttaataatgcaaatgcgcggcaaggatagcagaaagtcatgggaaattctgtggtatccgctcatgtttcgcgcggcgttacgcaaacccgaatcatcggatttaacggtacactgatattgacgctcataatgtaaaaaggttctttcaatggccaataataccactggattcacccgaattatcaaagctgctggctattcctggaaaggtttacgcgctgcatggatcaacgaagcggcattccgtcaggaaggcgtagcggtattgttggcggtggtcatcgcctgctggctggatgtggacgcaattacccgcgtgctgcttatcagctccgtgatgctggtgatgattgtggaaattctcaatagcgccatcgaagcagtggttgaccgaattggctctgaataccatgagctttccggacgcgctaaagatatgggatccgccgcggtgctgattgcgattatcgtcgccgtgataacctggtgcatcctgttatggtcgcattttggataacccttccagatttcgataaatctctggtttattgtgcagtttatggttccaaaatcgccttttgctgtatatactcacagcataactgtatatacacccagggggcggaatgaaagcgttaacggccaggcaacaagaggtgtttgatctcatccgtgatcacatcagccagacaggtatgccgccgacgcgtgcggaaatcgcgcagcgtttggggttccgttccccaaacgcggctgaagaacatctgaaggcgctggcacgcaaaggcgttattgaaattgtttccggcgcatcacgcgggattcgtctgttgcaggaagaggaagaagggttgccgctggtaggtcgtgtggctgccggtgaaccgcttctggcgcagcagcatattgaaggtcattatcaggtcgatccttccttgttcaagccgaatgctgatttcctgctgcgcgtcagcgggatgtcgatgaaagatatcggcattatggatggtgacttgctggcagtgcataaaactcaggatgtacgtaacggtcaggtcgttgtcgcacgtattgatgacgaagttaccgttaagcgcctgaaaaaacagggtaataaagtcgaactgttgccagaaaatagcgagtttaaaccaattgtcgttgaccttcgtcagcagagcttcaccattgaagggctggcggttggggttattcgcaacggcgactggctgtaacatatctctgagaccgcgatgccgccaggcgtcgcggtttgtttttcatctctcttcatcaggcttgtctgcatggcattcctcacttcatctgataaagcactctggcatctcgccttacccatgattttctccaatatcaccgttccgttgctgggactggtcgatacggcggtaattggtcatcttgatagcccggtttatttgggcggcgtggcggttggtgcaacggcgaccagctttctctttatgctgttgctgtttttacgcatgagcaccaccgggctgactgcgcaggcttatggtgccaaaaatcctcaggcattagcccgtgcgctggtgcaaccgttgctgttggcgttgggggctggggcgttaattgcgctgctgcgtacaccgattatcgatctggctctgcatattgttggcggtagtgaagcagtcctggaacaggcgcggcgctttcttgaaatccgctggttaagcgcaccggcgtcgctggcgaatctggtattactcggttggttactcggcgtgcaatatgcccgtgcgccagtaattttgttagtggtcggcaatatcctcaacattgtgctggatgtctggctagtgatggggctgcatatgaacgtgcagggcgcggctctggcgacggttattgcggaatatgcaacattgctgattggtctgctaatggtgcgtaaaatcctcaaactacgcggaatttccggcgaaatgtcgaaaactgcctggcgaggaaacttccgtcgcttgctggcgcttaaccgcgatatcatgctgcgttcgctgttgttgcaactctgtttcggcgcgatcaccgtacttggcgcgcgactggggagtgacattatcgctgtaaacgcggttctgatgacgctactcacctttaccgcctatgcgctggatggttttgcctacgcggttgaagcacattccggtcaggcatacggtgcgcgcgacggtagccagttgctggatgtctggcgggcagcgtgccgccagtcggggatcgtagcgttactattttcggtggtttatttgctggcaggggaacacatcattgcgttgctgacgtcgttaacccagattcagcagctggctgaccgctatcttatctggcaggtgattttgccgttggttggcgtctggtgttatctgctggacggcatgtttataggcgcaacgcgtgccgccgaaatgcgtaacagtatggcggtggccgccgcaggttttgcgctgacgctccttacgctgccgtggctgggtaatcatggtttgtggctggcattaaccgtctttctggcgttgcgcgggctttctctggcggctatctggcggcgtcactggcgtaacggtacctggtttgccgcaacgtgacggttaaaaattctgaataaattatcctaagccaaattgctgactacacttaatctcacgttcagaagaaaagtgaacgtactctcattcacaacctaacgatgaggtcttgattatgaataaagatgaagccggcggtaactggaaacagtttaaaggtaaagtgaaagagcaatggggcaaactgaccgatgatgatatgacgatcattgaaggtaaacgtgatcaactggtcggtaaaatccaggaacgttatggttatcagaaagatcaggcagaaaaagaggtcgtggattgggaaacccgcaatgaatatcgctggtaattaatccctcctgcccgacgtgtacaaggatgtacgccctcttaacgcggtttctttttcacctgcacagagtgatcatgctggcactgttcaggatgacgacacgcttccacttccacgcatgccgcacagagcccatgtgcttcaatcacattatgccgcagggcaaaccccatttttgccgccagcgtatgcataatgtcttccacgccttctgcacactcttctttcaccgcgccgcagcgatcgcatataaacatggctgacgtatgcgtgggctggtcgaacagatgacagagcacataactgttggtggattccaccttatgcacaaaaccttgctcaagcagaaaatccagcgcgcgataaaccgttggcggcttggcttgcggttcagcttcgcgcagtaaatcaagcagatcataagcgctgatagcgccatcctgcagactcatcaggcgcaacacttccaggcgctgtggggtcaggcgcacattacgctgcgcgcagattttttcagcctgcgctaataactcctgcgttgtggtcttttccatcgggcacctcaaagtgggggttaagaatgtccttactttaccatgttccaggaaaaacaccgagaacccttattgttgccgtaatgttgattttctgttttgtaggtaaggtgttatgttgccttgtcgtaccattatcaacacgataataattaataattcatttttaaataaattgcttcaagttaactcgctatttatttaactgggtttaaacgcatacctgtagttcagaaattatgagcgatttttgatagtgaccagatggcaaaagaattataaggaggacacggtacgacaaaaaaggtagatgaatcatgttgaagataatacccggtgcaactggatactttaataaaacactcaattcaaatcaattcgataatgaagatgcaatcaaagataaattagataatagaggttcaatcaaaggtaaattaaataatatatatggtaaatctattgattatgcagcgctgcgtcatcgggatataattattgcaaaaatagatttgtttattcaacgaatcacgcataatttatggcatgcacgtaaaaaaatgtgtttttaattgagcaaataaatgatctcaaaatgtgggtcaataagtatattgacgattgcactgatgaggatttaaacgatcgtgactttattgcatcagttgttgaccgggctatttttcatttcgcgattaatagtatatgtaatcctggggataataaagatgcgactcccattgaacaatgtacttttgatgtagaaactaagaatggccttccctccacggttcagctattttatgaggaatctaaggataatgaacctttagcgaatatacattttcaagcaataggttctggttttttaacgtttgttaatgcctgccaggaacatgatgacaacagcttaaaattatttgcttcgctgttaatttcactttcatattctagtgcctacgcagatttatcagaaacagtgtatattaatgaaaataatgagagctacctgaaagctcagtttgaaaaattatctcaacgtgatatgaagaagtacctgggagagatgaagcgtctggctgatgggggagaaatgaattttgatggctatctggataagatgtcacatctggtgaatgaaggaacgctcgatcctgatattttaagcaaaatgcgagatgctgcaccacaattaattagcttcgcgaagtcgtttgacccaacctcaaaggaagagattaaaatacttacagacacttctaaattaatttatgatttgttcggggttaaatcggagaaataatatgtgaagttcttcgatagtatggaaggcattatataaaaggacccaatatttattgggttcttttttctctatcaatgctattagcagggagatatatcaccagagtttaatgtgtgattttttatttatcgtcgaacctggattgtttatcattggccttaacaaagttaacggctaataagattatttccatcacttcgtgagagcttcatgccttgagaggatctcaattttcttttgcaatgagacaggcgcttcctgttgttatggtatagtaccccgctattgagcctcctgaatagtgatgctgaataacataaccccatgatatatcgataaaataatctctacatttgaaaatgcacggtaattctgaaatgcaaaaaatcaaccaaaccagcgcaatgcctgaaaaaactgacgttcactggagtggtcggtttagcgttgcaccaatgctcgactggacggacagacattgccgctatttcttgcgtctgctttcccgcaatacgttgctgtataccgaaatggtgaccacaggggcgattattcacggtaaaggtgattacctggcgtacagtgaagaagaacatccggtagcgttgcaactcggcggtagcgatccggcggcgctggcacagtgtgcgaagctggcagaagcgcgtggatatgatgagatcaacctgaatgtcggctgcccgtctgaccgggtgcagaacggcatgtttggtgcgtgtctgatgggtaatgcgcagctggttgccgactgcgtgaaagcgatgcgcgatgtggtgtcgattccagtgacggtgaaaacgcgtattggcatcgatgaccaggacagctatgaatttctctgcgatttcatcaacaccgtttccggcaaaggcgagtgtgagatgtttatcatccacgcacgtaaagcctggctttcggggttaagcccgaaagaaaaccgtgaaatcccgccgctcgattatccgcgtgtgtatcaactgaagcgtgactttccgcatctgacaatgtcgattaacggtggtatcaagtcgctggaagaggccaaagcacacctgcaacatatggatggcgtgatggtcgggcgcgaggcgtatcagaatccgggtattctggcggcggtagaccgggagatctttggttcctcggataccgatgccgatccggtggcggtagtgcgcgccatgtatccgtacattgagcgtgaactcagccaggggacgtatctcggccatattacccggcatatgttgggcttgttccagggtattcctggcgcgcggcagtggcggcgttatttaagtgaaaatgcccataaagcgggtgcagacattaatgtgctggaacacgcgctcaaactggtggcggataagcgttaacttttcaccaaaaagtagtcaaattcaccacgccctgcgcaccgtcgcggggcgttttgctgttaaatcaatagattatttttggcatgattcttgtaatgccagcaagagatttcatatttgggagagcatcatgctggaactactttttgtgattggcttttttgtcatgctgatggtcaccggcgtttcgttgctgggcattatcgccgcgctggttgtggcgacggccattatgttcctcggcggtatgctggcattgatgattaagttgctgccgtggttactactggcgattgcggtggtgtgggttattaaggcgattaaagcaccaaaagtgccgaaatatcagcgttatgaccgctggcgttactaagggattgtgcggatgatcacaacctaaggttttatccttagaacaaaataggaattgataatcaaatctgtcactattgcgcctctaacagattcatcgtgctgtaccctacatacagccgaactataaaaagaaagggcttcccaggtggaagccctatttcttttatggaatcaacaggctggaaccttgcgtcgcccggctttccagaatctcatgcgcacgctgcgcatccttcagcggatatttctgctgctcggcgacatcgaccttaatcacaccgctggcaatcaaagagaacagttcattactggcctcggttaattcctcccgcgtggtgatatagccttgcagggaagggcgtgtcacatacaacgagcctttttgattgagaatgcctaagttcacaccggtaaccgcacctgatgagttgccaaaactgaccattaagccgcggcgttgcaggcaatccagcgaccgttcccaggtgtctctgcccacggaatcgtacaccacgcgcactttcttaccgccggtgatctcttttaaccgctcgaccagatcctcttcacgatagttaataacctgccacgcgcccgcttttagcgcgctctgcgctttttgcgcggttcctacggtgccgataagtttcgcgcccagggcttttgcccactggcaggcaattaagccaacgccgccagccgctgcgtggaacaggaactgttcatcgggtttaatttcataggttttgcgcagcagataataaaccgttaagcctttcaggaaggatgccgcagcttgctcaaaagaaattgccgcaggcagaatcgccgctttatccgcattaatgttatgcacagagctgtaagcgcctaacgccgactgcgcatagactacacgatcgcctgccttaatatgctttacaccactgccgactttactcacgatgcctgccgcttcggtacctaatccgctgggtagtgatggcggcgggtaaaggccgctgcggatatacgtgtcgataaaattgatgccgatggctttattttcgacctggatttcattctctgccggatcggcaggagtgaactctacggcttgaagtacttccgggccaccgtgcttgtgaaattcaattcgtgttgccatgtgtcctccagaacgtatcgtcagggtctgcttcatatggtaaagtttcgacccattctttatctcggtaactccattcactatggcaggaaataaacccttcaacaaacagcaggctgaaccccgcgaacgcgatccacaagttgccgggctgaaagtgcctccgcactcgatcgaagcggagcagtcggtgttgggcggtttaatgctggataacgaacgctgggacgatgtagccgagcgtgtggtggcagacgatttttacacccgcccacaccgccatatctttactgaaatggcgcgtttgcaggaaagcggtagtcctatcgatctgattacccttgcggaatcgctggaacgccaggggcaactcgatagcgtcggtggttttgcttatctggcagagctgtcaaaaaatacgccaagtgcggcgaacatcagtgcttatgctgacatcgtgcgtgaacgtgccgttgtccgtgagatgatctcggttgcgaatgagattgctgaagccggttttgatccgcaggggcgtaccagcgaagatctgctggaccttgctgaatcccgcgtctttaaaattgccgaaagtcgtgcaaacaaagacgaagggccgaagaacatcgccgatgtgctcgacgcaaccgtggcgcgtattgagcagttgtttcagcagccacacgatggcgttaccggagtaaacaccggttatgacgatctcaacaaaaaaaccgctggcttgcagccgtcggatttgatcatcgtcgccgcgcgtccgtcgatgggtaaaacaacatttgcgatgaacctcgtcgaaaacgcggcgatgttgcaggataaaccagtacttatcttctcgctggagatgccttcagaacagattatgatgcgttctctggcgtcgctgtcgcgcgttgaccagactaaaatccgtaccgggcagctcgatgatgaagactgggcgcgcatttccggcaccatgggtattttgctcgaaaaacgcaatatctatatcgatgactcctccggcctgacgccaacggaagtgcgttcccgcgcacgccgtattgcccgtgaacacggcggcatcgggcttatcatgatcgactacctgcaactgatgcgcgtaccggcgctttccgataaccgtacgctggaaattgcagaaatctctcgctcgctgaaagcactggcgaaagaactgaacgtgccggtggtggcgctgtcccagttgaaccgttctctggaacaacgtgccgacaaacgcccggtcaactccgacctgcgtgaatctggctctatcgagcaggatgcggacttgattatgtttatctatcgtgatgaggtgtatcacgaaaacagtgatttaaaaggcatcgcggaaattattatcggtaaacaacgtaacggcccaatcgggacggtacgcctgacctttaacggtcaatggtcgcgcttcgacaactatgcggggccgcagtacgacgacgaataataattattttatgaattaggtaattaaagcaaacacttatcaaggaacacaaatgcaagcggcaactgttgtgattaaccgccgcgctctgcgacacaacctgcaacgtcttcgtgaactggcccctgccagtaaaatggttgcggtggtgaaagcgaacgcttatggtcacggtcttcttgagaccgcgcgaacgctccccgatgctgacgcctttggcgtagcccgtctcgaagaagctctgcgactgcgtgcggggggaatcaccaaacctgtactgttactcgaaggcttttttgatgccagagatctgccgacgatttctgcgcaacattttcataccgccgtgcataacgaagaacagctggctgcgctggaagaggctagcctggacgagccggttaccgtctggatgaaactcgataccggtatgcaccgtctgggcgtaaggccggaacaggctgaggcgttttatcatcgcctgacacagtgcaaaaacgttcgtcagccggtgaatatcgtcagccattttgcgcgcgcggatgaaccaaaatgtggcgcaaccgagaaacaactcgctatctttaataccttttgcgaaggcaaacctggtcaacgttccattgccgcgtcgggtggcattctgctgtggccacaatcgcattttgactgggtgcgcccgggcatcattctttatggcgtctcgccgctggaagatcgctccatcggtgccgattttggctgtcagccagtgatgtcactaacctccagcctgattgccgtgcgtgagcataaagccggagagcctgttggttatggtggaacctgggtaagcgaacgtgatacccgtcttggcgtagtcgcgatgggctatggcgatggttatccgcgcgccgctccatccggtacgccagtgctggtgaacggtcgcgaagtaccgattgtcggacgcgtggcgatggatatgatctgcgtagacttaggtccacaggcgcaggacaaagccggggatccggtcattttatggggcgaaggtttgcccgtagaacgtatcgctgaaatgacaaaagtgagcgcttacgaacttattacgcgcctgacttcaagggtcgcgatgaaatacgtggattaatcgttctgtaatatttgattgtctgtgccggatgcggcgtgaatgccttatccggccaataaaatcctaaaaattcaataagttgatgttctttcatgctcttataaaggtcgtgcctctggcggatgttcgtttgtcatgagtctcactctgttgctaattgccgttcgctcctgaacatccactcgatcttcgccttcttccggtttattgtgttttaaccacctgcccgtaaacctggagaaccatcgcgtgtttcaaaaagttgacgcctacgctggcgacccgattcttacgcttatggagcgttttaaagaagaccctcgcagcgacaaagtgaatttaagtatcggtctgtactacaacgaagacggaattattccacaactgaaagccgtggcggaggcggaagcgcgcctgaatgcgcagccccatggcgcttcgctttatttaccgatggaagggcttaacagctatcgccatgccattgcgccgctgctgtttggtgcggaccatccggtactgcaacaacagcgcgtagcaaccattcaaacccttggcggctcaggggcattgaaagtgggcgcggatttcctgaaacgctacttcccggaatcaggcgtctgggtcagcgatcctacctgggaaaaccacgtagcaatattcgccggggctggattcgaagtgagtacttacccctggtatgacgaagcgactaacagcgtgcgctttaatgacctgttggcgacgctgaaaacattacctgcccgcagtattgtgttgctgcatccatgttgccacaacccaacgggtgccgatctcactaatgatcagtgggatgcggtgattgaaattctcaaagcccgcgagcttatcccattcctcgatattgcctatcaaggatttagtgccggtatggaagaggatgcctacgctattcgcgccattgccagcgctggattacccgctctggtgagcaattcgttctcgaaaattttctccctttacggcgagcgcgtcggcggactttctgttctgtgtgaagatgccgaagccgctggccgcgtactggggcaattgaaagcaacagttcgccgcaactactccagcccgccgaattttggtgcgcaggtggtggctgcagtgctgaatgacgaggcattgaaagccagctggctggcggaagtagaagagatgcgtactcgcattctggcaatgcgtcaggaattggtgaaggtattaagcacagagatgccagaacgcaatttcgattatctgcttaatcagcgcggcatgttcagttataccggtttaagtgccgctcaggttgaccgactacgtgaagaatttggtgtctatctcatcgccagcggtcgcatgtgtgtcgccgggttaaatacggcaaatgtacaacgtgtggcaaaggcgtttgctgcggtgatgtaatgcaggaaagcaggctggagttacccagcctgcagtgaaattaaactgtcgtcgctttcactatttctttgtagatgatttttttgatgccgttgttctacgtgagagataataaaacgttgtcagttcttttattgttaagtttatcccaattatctggaattcctttccctattttttcgtgtggagtaataatttctgcacatctaaccattattaaatttaataataagtatcgggtttgttacgatagaatatttctatatcctcaagaatatactttgccttattgcctgtgactttctgagattcaattatagtatcgttaaattctaatgttaaagagaactctttttttccgctttgtgtaagtttaaccttatattgattaccaatatcaaataaaaaggtcctgtaatgagaataatcacctttaacctcctcggcaaaacagcaaagcgtgcaaatatacataaagtctttcttacccctgattttgttaactaaatcgataaatgcgtgaaaaactttacttgcaatagaacttgatacttcttctccaggtctacaaaaatcttttgcaatttttaactgtgtttctatgtataaaaagaaatctttagcataagaaaaatctttggcataagaaaaatctttggcataagagatgtctttattatttagtgcatctagctcaacaggtaaagatgtcgttttgttgctattcacatatgatatattcatatcatcatctccatcgggagtaataaaattagtcaccattgtaggatagggttctggtcaatcaggaatcatctttataaacttcgattgtttttgtaatgctgtatcattaagttcattaaatcgtacagcagataaatgttctttcaaatttcgctcatttgcagaggattcatcataataaacgtaaaattaatgtatccttacatcgagtaataaacattttttatacaaaaaaagacaggaacgtatttactgggttaaatataatcatcctgcttttcatcacaaaaaccgcagataatccttcctttccccggcagctggcgttatggtcagatggtttttgcaacaaatctcacaataaaaagtttcaacatactgactatttagggaaaaatatgcgcaagatcacacaggcaatcagtgccgtttgcttattgttcgctctaaacagttccgctgttgccctggcctcatctccttcaccgcttaaccctgggactaacgttgccaggcttgctgaacaggcaccaattcattgggtttcggtcgcacaaattgaaaatagcctcgcagggcgtccgccaatggcggtggggtttgatatcaatgacacggtacttttttccagtccggggttctggcgcggcaaaaaaaccttctcgccagaaagcgaagattatctgaaaaatcctgtgttctgggaaaaaatgaataatggctgggatgaattcagcattccaaaagaggtcgctcgccagctgattgatatgcatgtacgccgcggtgacgcgatcttctttgtgactggtcgtagcccgacgaaaacagaaacggtttcaaaaacgctggcggataattttcatattcctgccaccaacatgaatccggtaatctttgcgggcgataaaccagggcaaaatacaaaatcgcaatggctgcaggataaaaatatccgaattttttatggcgattccgataacgatattaccgccgcacgcgatgtcggcgctcgtggtatccgcattctgcgcgcctccaactctacctacaaacccttgccacaagcgggtgcgtttggtgaagaggtgatcgtcaattcagaatactgacagagcgggagagcgtgatgctctcccgaatgctgtttttttaatcacacctttatcctttcgctgtcttgctgcaaactgattaagagagttttatcaaggagcagcacatgtggtatcaaaagacgctcacgcttagcgccaaatctcgtgggtttcatctggtaacggatgaaattctgaatcagctggctgatatgccgcgcgttaacatcggcttactgcatctgttgctgcaacatacctccgcctctctgacacttaatgagaactgcgatcccaccgtacgccacgacatggagcgttttttcctccgcaccgttcccgacaacggaaattatgagcatgactatgagggagcagacgatatgccttctcatatcaaatcctcaatgctgggaacatcgcttgtattgccgttacataaagggcgtattcagaccggcacctggcaaggcatctggctgggggaacatcgcatccacggcggatcgcgtcgcatcatcgcgacactacaaggggagtaaaaaatgaccatttcggagttgctacaatattgcatggcaaaaccaggcgcagaacagagcgtgcataacgactggaaagcgacgcagatcaaagtggaagatgtactgtttgcgatggtgaaagaagtagaaaatcgcccagctgtttcgctgaaaaccagcccggagctggcggagctgctacgtcagcagcacagcgatgtgcgtcctagccgccatctgaataaagcgcactggagcaccgtgtatctcgacggttcgctgccggattcgcaaatctattatctggtggatgcgtcttatcagcaggcagtgaatttactaccggaagaaaagcgtaaattgctggtacaactctgaaaggaaaaggccgctcagaaagcggccttaacgattacagcatcggcttgaggaagcgtgccgtatgcgaagcttcgcactccgcgacggtttctggcgtaccggagacgaggatttcgccgccgccactgccgccttctggtcccaggtcgacaatccagtcagcggttttgatcacgtcgagattgtgctcaatcaccacaatggtattgccctgatcgcgcagtttatgcagcacgtcgaggagttgctgaatatcggcgaagtgcagaccggtggtcggctcgtcgagaatatacagcgtctgcccggtgccgcgttttgacagctcacgcgccagcttcacgcgctgggcttcaccaccagaaagtgtggttgcggactgccccaggcgaatgtacgtcagaccaacgtccatcaacgtttgcagcttacgcgccagagctggcaccgcatcaaagaactcacgcgcctcttcgatggtcatatccagcacttcgtggatggttttgcctttgtacttaatttccagcgtttcacggttatagcgtttacctttgcactgatcgcacggcacgtagatatccggcaggaagtgcatctccactttgatcacaccgtcgccctgacaggcttcgcagcgcccgccacggacgttaaagctgaaacgtcctggcgtataaccacgcgcacgggattccggtacgcccgcaaacagttcgcgcacaggtgtaaacacgccggtataggtcgccgggttagaacgtggagtacgaccaattgggctttggtcgatatcgatcactttatcgaaatgctccagcccctgaatatcgcgatacggtgccggttcggcgatggtcgcaccattcaactggcgttgggcaatcgggaacagtgtgtcgttaatcagcgtcgatttaccggaacctgaaacccctgtgatgcaggtaaacagaccgactggcagcgtgagcgtcacgtccttcaggttgttgccgcgtgcacctgtcagcttcagcactttttctggattcgccggaacgcgtttcttcggcacttcaatcttgcgtttaccgctcatgtactgcccggtcaacgattcaggcaccgccataatcgcttccagcggaccttctgcgaccacttcaccgccgtgaacacccgcaccaggaccgatatcgatcacatggtcagcggcgcgaattgcgtcttcgtcatgctccaccacaatcacggtattaccgagatcgcgcagatggataagcgtacccaacaggcgctcgttatcgcgctggtgcaggccgatagacggctcgtccagtacatacataacgccaaccaggcccgcaccaatctggctcgccagacggatacgctgggcttcaccgccggaaagtgtttctgccgagcgggaaagtgtcaggtaattcaggccgacgttaacgaggaatttcagacgatcgccgatctctttaaggattttttctgcaatcttcgcccgctgacctgcgagtttgagattgttgaagaattccatcgcatgaccgatgctcatgtcggagatagcaggcagcggcgtattctcgacatacacgtggcgcgcttcccgacgcagacgcgttccttcgcagctggcgcatgggcgattgctgataaacttggctaattcttcacgtaccgcactggattccgtctctttataacggcgctccatattgtgcagcacgccttcgaacggatgacgacgaatggaggtatcgccacgatcgttcatgtatttgaattcaatgttttctttgccagaaccgtacaacaccactttatgcacgttcgcgctcaggctgccccacggcgcttcgacgtcgaacttatagtgatctgccagcgatttcagcatctggaaataatagaagttgcggcgatcccagccacggatcgcaccgccagccagtgacagctcgggattttggatcacgcggtcaggatcgaaatattgctgtacgccaaggccgtcacaggtcgggcaggcacctgccgggttgttaaacgaaaacagtcgcggctccagttcacgcatactgtagccgcaaattgggcaggcgaagttggcggagaacagcagctcttccgctttcgggtcgtccatatccgccactaccgctgtaccaccggaaagctccagcgcggtttcaaacgactccgcaagacgttgggtaagatcgtcacgcaccttgaagcgatcaaccaccacttcaatagtgtgtttcttttgcagttccagtttcggcggatcggaaagatcgcagacttcgccatcaatacgagcacggatgtaaccctggcttgccaggttctccagcgttttggtgtgttcgcctttgcgctctttaatgattggcgcgagcagcatcagacgcttgccttccggctgcgacagcacgttatccaccatctggctgacggtttgcgccgccagcgggacgtcgtggtccggacagcgcggttcgccgacgcgggcgaacaacaaacgcaaatagtcgtggatttcggtgattgtccccaccgtagaacgcgggttatgagacgtcgatttctgctcaattgagatggcaggagaaagcccctcaatatgatcgacgtccggcttttccatcagtgacagaaactgccgcgcgtaggcggaaagggattcaacgtaacggcgctgcccttcggcatataaggtgtcgaaagcgagcgaggatttgccagaacccgaaagcccggtcacgacaatgagcttgtcgcgggggataacgaggttgatgtttttgagattatgggtgcgggcgccccgaacttcgatcttatccattcacctttcccggattaaacgcttttttgcccggtggcatggtgctaccggcgatcacaaacggttaattatgacacaaattgacctgaatgaatatacagtattggaatgcattatccggagtgttgtgtaacaatgtctggccaagtttgtttcccggaaccgaggtcacaacatagtaaaagcgctattggtaatggtacaatcgcgcgtttacacttattcagaacgatttttttcaggagacacgaacatggccagcagaggcgtaaacaaggttattctcgttggtaatctgggtcaggacccggaagtacgctacatgccaaatggtggcgcagttgccaacattacgctggctacttccgaatcctggcgtgataaagcgaccggcgagatgaaagaacagactgaatggcaccgcgttgtgctgttcggcaaactggcagaagtggccagcgaatatctgcgtaaaggttctcaggtttatatcgaaggtcagctgcgtacccgtaaatggaccgatcaatccggtcaggatcgctacaccacagaagtcgtggtgaacgttggcggcaccatgcagatgctgggtggtcgtcagggtggtggcgctccggcaggtggtaatatcggtggtggtcagccgcagggcggttggggtcagcctcagcagccgcagggtggcaatcagttcagcggcggcgcgcagtctcgcccgcagcagtccgctccggcagcgccgtctaacgagccgccgatggactttgatgatgacattccgttctgatttgtcattaaaacaataggttatattgttttaaggtggatgattaaagcatctgccagccataaaaaagaagcctccgttatggaggcttctacgtatcaggtcaaaatcattggccattgtggcggtgtctgattcatctcttctatcatcaccgactcgatgttgtgccagatagcggtgatgtccgccattgtgatgccaagcaaccccattgcgaaccaacaggcggaaacaacgcccagaccgctgctgatcaccgcaagcccgacataatcagaccgacgaaaacggatgttgatgtgctggccagaaacatcattacggcactaagaagctgccagcgaagaagaaccacgccagtggtgagggtagccatcaaacaattcctctgaaaagagccgatgccctggacagcgcggcgttgttcacgggaggcgtggtacactctggctatcgcggggcttgcagaacacaaaaatgaaacactctgtttgtttcattaattttgtgagctatatcacaattgattgtttgttagccatattaggccgtgacttttattgctgtacagattatgtggtttttcagtggcattaagggcatatcttcccgccgcctctgcattcctgtaggaaattaattttgaatatcaatgaattattttcatccaggtgacgattagaaaggtatcaatttcaaatcaggcaaaagtgctatttataccgtaagatttatctaaagacgtcggtacccagggttttcaccttgcaatggccgggtataaacaggcaggaaattgatagcaatgagtcatcgtgcacgacaccaattactggcgttgccgggcattatctttttagttctctttcccatcattctttcgctatggattgccttcctttgggcaaaatcagaagtgaataatcagctccgaacctttgctcaactggcactggataaatccgagctggtcattcgccaggcagatttagtgagcgatgcagctgaacgctatcaggggcaagtttgcactccagcccatcaaaagcgaatgttgaatattattcgtggctatctttatattaatgaattgatctatgcccgtgataaccattttttatgctcatcgctgatagcgcctgtaaacggctatacgattgcaccggccgattataagcgtgaacctaacgtttctatctattattaccgcgatacgccttttttctctggctataaaatgacctatatgcagcggggaaattatgtggcggttatcaaccctctcttctggagtgaagtgatgtctgatgacccgacattgcaatggggtgtgtatgatacggtgacgaaaacctttttctcgttaagcaaagaggcctcggcagcaacgttttctccgctgattcatttgaaggatttaaccgtacaaagaaatggctatttatatgcgacagtttattcgacaaaacgcccaattgcagccattgttgcgacttcatatcaacgtcttataacccatttttataatcatcttatttttgcgttgcccgccggtattttggggagtcttgttctgctattactctggctacgtattcgacaaaactatttatctcccaaacgtaaattgcaacgcgccctcgaaaaacatcaactttgtctttattaccagccaataatcgatatcaaaacagaaaaatgtatcggcgctgaagcgttgttacgttggcttggtgagcaggggcaaataatgaatccggcagagtttattccgctggcagaaaaggaggggatgatagaacagataactgattatgttattgataatgtcttccgcgatctgggcgcgtacttggcaacacatgccgatcgctatgtttctattaacctgtcggcctccgattttcatacgtcacggttgatagcgcgaatcaatcagaaaacagagcaatacgcggtgcgtccgcagcaaattaaatttgaagtgactgagcatgcatttcttgatgtcgaaaaaatgacgccgattattctggctttccgccaggctggttacgaagtggcaattgatgattttggtattggctactctaacttgcataaccttaaatcattgaatgtcgatattttgaaaatcgataaatcgtttgttgaaacgctgaccacccacaaaaccagtcatttgattgcggaacacatcatcgagctggcgcacagcctggggttaaaaacgatcgctgaaggcgtcgaaactgaggagcaggttaactggctgcgcaaacgcggcgtgcgctattgccagggatggttttttgcgaaggcgatgccgccgcaggtgtttatgcaatggatggagcaattacccgcgcgggagttaacgcgcgggcaataaaactacaggcggtggcgataatcgctgggagtgcgatcaaactgccgacggaaaacgcgggagaaggtctgctgcgagacataacccaggtccattgcgatatcaaaaatcggacgctcggtggtgcgcaactcaacggcggccagtaacaggcgacgttggcgaatgtaatcgccaagcgtctgatgcgtcaccgtgcggaacattcgttgcaagtaccactttgaatagcctgatttttttgcgactacatcaatgttaagcggctggtcaatatgctcgtcaatccatgcgataagatcctgaataattttctgatgggacataaatctgcctcttttcagtgttcagttcgttaattcatctgttggggagtataattcctcaagttaacttgaggtaaagcgatttatggaaaagaaattaccccgcattaaagcgctgctaaccccggtgatgctgccaacttactgatttagtgtatgatggtgtttttgaggtgctccagtggcttctgtttctatcagctgtccctcctgttcagctactgacggggtggtgcgtaacggcaaaagcactgccggacatcagcgctatctctgctctcactgccgtaaaacatggcaactgcagttcacttacaccgcttctcaacccggtacgcaccagaaaatcattgatatggccatgaatggcgttggatgccgggcaactgcacgcattatgggcgttggcctcaacacgattttacgtcacttaaaaaactcaggccgcagtcggtaacctcgcgcatacagccgggcagtgacgtcatcgtctgcgcggaaatggacgaacagtggggctatgtcggggctaaatcgcgccagcgctggctgttttacgcgtatgacagtctccggaagacggttgttgcgcacgtattcggtgaacgcactatggcgacgctggggcgtcttatgagcctgctgtcaccctttgacgtggtgatatggatgacggatggctggccgctgtatgaatcccgcctgaagggaaagctgcacgtaatcagcaagcgatatacgcagcgaattgagcggcataacctgaatctgaggcagcacctggcacggctgggacggaagtcgctgtcgttctcaaaatcggtggagctgcatgacaaagtcatcgggcattatctgaacataaaacactatcaataagttggagtcattaccgataatgcagagaatatgccttttctttcttgttaattataaggatattttatgcgctataatggtttaaataatatgtttttctctctttgccagattaacgataaccactctttcacaagttcatcacatacaaagaaaacaaaatcatataattacagcaaacatcataaaaacacgttaattgacaataaagccctctctcttttcaagatggatgatcatgaaaaagtgataggtttgattcagaaaatgaaaagaatttatgatagtttaccatcaggaaaaatcacgaaggaaacggacaggaaaatacataaacattttatagatatagctttatatgcaaataataaatgtgacgatagaattacgagaagagtttaccttagtaaagaaaaggaagtatccattaaggtggtatattttataaataatgtcgccgtccataataatactatcgaaattccacagacagtaaatggtggttacgatttttcacaccttagcctgaaaggtatcgtgattaaagatgaagatttatccaattcgaattttgcaggttgcagactacaaaacgctattttccaggactgtaatatgtataaaacgaatttttattacgccataatggaaaaatactttttgataattgtattctcgatgactcaaatttcgctcagataaaaatggccgacggaactctaaatgcatgctccgttatgcatgttcaattctacaatgcagcaatgaatagagccaatattaaaaatacctttcttgactattcaaatttttatatggcgtacatggctgaggcaaatctttataaagtaatagcgccatatgttaatttatttaaagccgaccttagtttctctaaactcgatttaattaactttgaacatgctgatctgtctcgcgtcaatctgaacaaagcaatcctccagaatataaacttaattgatagcaaactcttttgtacgtggctaacaaatacattcctcgaaatggttatatgtaccgactctaatatggctaatgttaattttaataatgccaatttaagcaactgccatttcaactgttctattttaacaaaagcctgtatgtttaatacccgtctctatcgggttaattttgatgaggctagcgtccagggaatgggcatttccatactccgtggggaggaaaatatccccattgatagtgataccctggtaacactacagaaattctttgaagaagattgtacctctcatactggcatgtcacaaactgaggataatattaatgcagtcgctatgaagattactgcagatattatgcaacacgcagattgaggttaagtcgaagaacagccaatgaattgactttacaagagagataacttatttgttttagaatcatgaatgttagcccgagctaacctgttaaaggtgcaaaagattgcacctttttcagattacctcgggcctggttacgtcgctttcggcttactgattttcctcaattagcaacgcttcaagcaaatcgagatcgtgcagtaatttttgcagcgtttcgttgctgatctcccgcgtggcgcgcaggtggtacagttcagcacgttcagaacgcaatgccgccagacggaagcgacgctcaaggttctcttcctgcacggaactttcaacgtcgttacgtccatcggcgcgacgacgcaggttaccaatgacgcgagaactgacctccgtaagcagctggttatcgatattctcttcggtatccgccgccagacgctcctccattttctggatcgccacaatcgccacttctgccgttgccgctcgcgcaatacgttcttctttcaattgttgcgaatggtccgcgacttcaatgtgttgtagcagaataggcaacatcaccacgccgacaaacagcgagaagagaatgacgccagccgccaggaacaccagctcatagcgcgccgggaagacgttaccatccggcaagagcagcgggatagagagcacaccggccagagtgatcgccccacgcaccccggcgaaagacgcgatcaggatttctcgtgtggtccacgaaccaaactccatcggcttcttcttcaggaagcggttgctgaactttttcatcgtccacagccagccgaaacggaccagcatcagcgccgcatatatcagaataatatcggtaaacagcatccagatttcgacgttagggtcgatttctgccgccatcagcgacgtctccagaatacccggcagctgcagacctaacagcaggaacaccatgccgttaaagacaaattccagcatcgcccaggtgctgtttgcgcgcaggcgcattgccagcggcgcacggcgcatcacaccggagcgggtgatggtcatcccggcggcaaccgcagcgaggatgccggaaacgccaatatgttcggcaatcagataagaagcgaatggcagcaagaacagcagaacgatctgcgtcgcgggttcatcaccgccccagcggctgaggaatcgcagcgagcgaccatacagccagctcaccacaaaaccggcaagaataccaccaatggctactttcataaattcgaccgtcgcaccgccgacggtgaagatcatcgtccccatcgccactgccacggcaaacttcaacgacaccaggccggaggcgtcattcatcaacgcttcgccctgcaaaatgcccatgatttttttcgggatgcgcccttcgccaacaatcccggagagcgccacagcatcggtcggagaaagtaccgccgccagcgcaaaggcggggatcagcggaatgcccggcaccacccagtaaataaggaagccaatgccgaccacggtgaccaccaccagcgccagcgcgaggccgaaaatctctcgaccatgttcgagaaattcacgggtcggcgttttccagccatcagcgaacagcaacggcgggataaacaagactaaaaagagttcaggatcaaactccacatgcaaaccaaacgtcggccacgccagtagcgcaccgatggcgatttgcataagcggaagcgggatctgaaagggcatgacacgagtgaccaccccggacagtgagaccacgagggtcattatcagtatggtgaagaagatttccatgcgttccctgtttgcgatgtttttttatgatctgagaaaggcgttatgcctgaattctcattttttcagaatatcgcaaaagctcacacaatgtgcggagaaaataaaaacgggcagccattgccacccgttttcagaatccgatgaaagattagatagcccagccacccgcatagaaggtcaccagcgccacggcgataacgaccgtaccgatgttcaacttgcgccattcgccggaaaccagacgaccaatcaccagagtcgcgaagccgatcatgatgcctgttacgatgttacaggtcagcacgatgaataccgccgtaaccagacccgccatcgcatcaacaaaatcagcaaagtcgattttcgccacgttgctcagcatcagcaggccaacgtacatcagcgccggagccgttgcataccccggaacgaggtaagagagcggagagaggaacagaatcagcaggaacagcacgccaacggtgatagccgtcaaaccggttttaccgcccgccgccgtacccgccgcagactcgatgtataccgctgccggagcagcacccaccaggccagagaaaacgctgctcatggagtcagtggtcagtgctttcccaccgtcgatgatctgcccatctttatccagcaggttcgcctggccggcgacggcacggatagttccggtggcatcaaatactgccgtcatcaccagcgccagaacgcttggcaggactacaggattcagcgcgcccataatgtccaggctgccaatcagtgaattgccgttttcatcgctcaatgaaggcatggcgaaaacgccggagaaatggacgttaggatcgaagatcaaaccgacaattgagataccgataatggtcagcagaatgccaccagggactttcagtttttccaggccgatgatcaccgccagacctaccagtgacataatcaccgggaaggtcgcgaaatcacccagcgcaacgggcagaccatcaagcgggtttttaatcaccagaccgacaccattagcggcaatgagcagcaggaacagaccgataccgatccccgtgccgtgcgccacaccgtgcggcaagttgcgcaaaatccagctacggatacccgtggcagaaattaccgtaaacagcacacccatcaggaacacggcacccagcgcgacaggtacgctaatatgttgccccagcaccaggctgaatgcggtaaacgccgtcagggagatggcgcaaccaatcgccaacggcagattagcccacagacccatcacgatagaaccgagtccggcaaccagacaggttgcaacgaaaactgccgcaggcgggaagcctgctttacccaacatacctggaacgacgatgaccgagtagaccatcgccagaaacgttgttaacccggcaaccacttcctgacggacagtgcttccacgttgtgaaattttaaaccaggcgtcgagtgaaccgccggtacgcgctgatggcgtagacataagaaaacatcccctgagagtttaattttcgtcaagatgcgtggcggacaatcccctgccagcgaaacgttatcttcctgctccaggtttgcgacaatttactgcgtcgcaaaaaagcaaacgtttagctccgcgcatacaaaacgggtggtaaaaaaagcaaacgattatccggcgatcatagcggctttttcaaccgaagtttgctgcttttttctcttttattgtcttgacgatgaaaaaccaggcaattgatgcgcaaacgttatcgtcggtgcgcaagattgcagcgttatcgagccgtataccgttcaggattgcgataaaaaatcgtctgagatgacaaaaatattgcggataaaaagtatacttttacactggcgaagaaatgccggtgacatacaattaaagcatcaacaccaaccggaacctccaccacgtgctcgaatggggtgtgttgacgtcgggggaaaccctcctgtgtaccagcgggatagagagaaagacaaagaccggaaaacaaactaaagcgcccttgtggcgctttagttttgttcatcttccagcaagcgtgcgccggtaccttcttctcctaagcggtcgcccgggttacgcaacgggcaatcactgcgcgaaaggcagccacaaccaatacatccgtccagttcgtcacgcagcgccactaaggtatgaatgcgccgatccaactcttctcgccattgggacgaaagctgtttccactctttcgcacttaacgtatgcccttcgggcaacacgccaaacgcttcaccaatggtcgccagcggaatgccaatacgctgagcaattttgataattgcaacatatcgcaacacatcacgtttatatcgccgctgattgccgctgttacggatactggtaatcaaccctttactttcatagaaatgcagcgccgataccgccacaccgctgcgtttcgccacttcgccgggggttagggtaatgactccaacttattgatagtgttttatgttcagataatgcccgatgactttgtcatgcagctccaccgattttgagaacgacagcgacttccgtcccagccgtgccaggtgctgcctcagattcaggttatgccgctcaattcgctgcgtatatcgcttgctgattacgtgcagctttcccttcaggcgggattcatacagcggccagccatccgtcatccatatcaccacgtcaaagggtgacagcaggctcataagacgccccagcgtcgccatagtgcgttcaccgaatacgtgcgcaacaaccgtcttccggagactgtcatacgcgtaaaacagccagcgctggcgcgatttagccccgacatagccccactgttcgtccatttccgcgcagacgatgacgtcactgcccggctgtatgcgcgaggttaccgactgcggcctgagttttttaagtgacgtaaaatcgtgttgaggccaacgcccataatgcgtgcagttgcccggcatccaacgccattcatggccatatcaatgattttctggtgcgtaccgggttgagaagcggtgtaagtgaactgcatttgccatgttttacggcagtgagagcagagatagcgctgatgtccggcagtgcttttgccgttacgcaccaccccgtcagtagctgaacaggagggacagctgatagaaacagaagccactggagcacctcaaaaacaccatcatacactaaatcagtaagttggcagcatcacctgcattatcattttctacgactgtcaaaaatcgctcattttttaatgagtttatttgtttaatattttgggaaaaggtgatgcatgctggagaggaagagtattccccggtcaggcgaccggggaaggggagagattaatgtgcgcggccttgctcaacgccaaagccggtctgggagcggataaactgcgcgcggaacagttcacgctcgcgcgccccttccgctgagttatcggttgccgagaagaaccagatgccgaggaatgccacggtgatagagaacagcgccgggtattcatacgggaagatggctttttcgtgaccaaggatctgtacccaaatcgtcgggccgaggatcatcagtactactgcggtaatcagccccagccagccacccatcatcgcgccacgcgtggtcagtttcgaccagtacatagaaagcagaatgatcgggaagttacagctcgccgcgatggcaaacgccagccccaccataaaggcgatgttctgattctcaaacagcacgccgaggataatcgcaatcacgccgaggatcagtacggtgatttttgatacccgcagctcttcacgttcggtcgcgccttttttgaagacgttagcgtacaagtcatgcgaaaccgcggatgcgcccgccagcgtcagacccgcaaccaccgcgaggatagtggcgaaagcaaccgctgaaataaaaccgaggaacaggttgccgcccactgcattcgccaggtgaacggccgccatgttgttaccaccaatcagatggcccgccgcgtctttatattccggattcgcaccaaccagcatgatcgcgccgaagccgataataaaggtcagaatatagaagtagcccataaacccggtggcgtagaacacgctcttacgtgcttcgcgggcatcgctgactgtaaagaagcgcatcagaatgtgcggcaagcccgccgtaccaaacatcagtcccagacccagagagagtgcggagatcggatctttcaccagcccgcccggcttcatgatgtcgacacctttcgggtgtaccgccatcgcttcactgaacagattgttgaagctaaagccgacgtgtttcatcaccataaaggccataaagctggcaccgaacagcaacagcacggctttgataatctgtacccaagtggtcgccagcatgccgccgaacaggacgtacatcatcatcagcacgccgaccagcaccaccgcaatgtgatagttaaggccaaacagcagctcgatcagtttacctgcgcccaccatctgggcgataaggtaaagcgccaccaccaccagagaaccacaggccgaaagaatacgaatcggcccttgtttcagacggtaagaggccacatcggcaaaggtgtagcgccccaggttacgcagacgttcggcaatcaggaacaaaatgatcggccagcccaccaggaagcccagcgagtaaattaagccgtcatagccggaggtaaacaccagcgcggagatccccaagaatgaggcggcggacatatagtccccggcaatcgccagcccgttctggaagccagtgatattgccgcctgcggtgtagtagtcgctacgagaacgtacgagttttgatgcccagtaggtaatgccgagcgtaaacacgacgaaaatcaggaacataataatcgcctgccagttcgttggctggcgctctacggccccgctaatagcatccgcggcgttagctgcgaaagggagtgtggcggcaagcgccgtcagaactcttttcatgatgcttgtacctcatgcaggacttcattattaagacggtcgaattcgccgttcgcccgccagatgtagataccggtgagaacaaaggagatcacaatcactccaacaccaattggaataccgcgtgtgacgctggtgttcggattcagcggcgtgccagccagccgggcgcgaaggcgatcagtaaaataaagccgatataaactgccagcataataatcgacaggatggtggcaaaccgttgccgtttttcgactaactccctgaaatgcgcattgtcttctatccgctgataaatagtgccattcatcacagattctccagaggtaatgtagggattgttttaattcccgctcccttatgggagaaggttaacgctcgggtaacccttgccgaatgtaggccggataaggcgtttacgccgcatccggcaatcaatgcctgatgcgacgctgtcgcgtcttatcaggcctacaaaccgttaccgactcgcatccggcaattgtgggttacgatggcatcgcgatagcctgcttctcttcaagcagcttctcgactacgccaggatcggcaagcgtcgaggtatcgcccaggttgctggtatcgcccgccgcaattttgcgcagaatacggcgcataattttgccggagcgggttttaggcagggagtcggtccagtgcagcacgtctggcgtcgccagcgggccaatctctttacgcacccagttgcggacttctgcgtacagttctggtgacggttcctccccgtgattaagcgtgacgtaggcgtagatcgcctgacctttaatattgtgcggaatacctactacggcggcttcggcaatcttcggatgcgccaccagcgccgactcaatctctgccgtccccagacggtgaccggagacgttcagcacgtcgtccacacgcccggtgatccagtaatagccatcttcatcgcgacgcgcgccgtcgccgctgaaatacatatttttgaaggtggagaagtaggtctgttcaaaacgttcgtgatcgccaaacagcgtacgcgcctgacccggccaggagtcggtgatcaccaggctgccttcggtagcgccttccagcgggttaccttcgttatcgaccagcgccggttgcacgccgaagaacggacgtgttgccgaaccggctttcagctcggtagcgccaggcagcggcgtgatcatgaaaccgccagtttcggtctgccaccaggtatcgaccaccggacatttctcgttgccgatttttttccagtaccactcccacgcttccgggttaattggctcgcccacggaaccgagaatgcgcagcgacgaacggtcggtaccctcgatcgctttatcgccttccgccatcagcgcgcggatcgccgtgggtgcggtatagagaatattgacctgatgcttgtccaccacctgcgccatacgggcaggcgtcggccagttgggtacgccttcaaacatcagcgtggtcgcaccgcaggccagcgggccgtacagcaagtaactgtgtccggtcacccagcccacatcggcggtgcaccagtagatatcacccggatgataatcaaagacatatttaaaggtcagcgccgcgtacaccagataaccgccggtagtatgcagcacaccttttggcttaccggtagaaccggaggtgtagagaataaacagcggatcttcggcgttcatcttttccgcctggtgctgatcgctcgcttgctcaaccaggtcgtgccaccacaggtcgcgcccttcctgccagtcaattttcccgccagtacgcttcagtaccaccacatgctctacgctggtgacgttcgggtttttcagcgcgtcatcaacgtttttcttcagcggaatactgcgcccggcacgcacaccttcgtcggaagtgatcaccagtcgtgagttggaatcaataatgcgcccggcaacggcttccggcgagaagccgccgaaaatcaccgaatgcaccgcgccaatgcgggcgcaggccagcatcgcaaccgcggcttccggcaccatcggcatataaatcgccaccacatcaccttttttaatgcccagctcgagcagggtattggcgaagcggcagacgtcgcggtgcagctctttatagctgatatgtttgctctggctggcgtcgtcgccttcccagatgatggcggtacgatcgccgttttcttgcagatggcggtcaaggcagtttgccgccagattcagcgtgccgtcctcgtaccatttaatggacacattaccgggggcaaaggagtaatgccagtcagttaagcaactgactggctctttttcggggctgtggggtatttccagggcctctcctttaccactctcgggaaggccctttcccttctcgtcggtaatttcacaagttgtcccatacttgcaagatcgcgcatcagctccggtatacgtcccggtgaagcgccctgcaatgtcatcagcattctcatcaccattccgcatgattctgagaaactcagttgattcggccagtaacctttcagatgttccgccattttaatcatctgatatctcaccagattataagccagtaagacaccccacagctcttgctccacaagctccggctttttacttctcagcgtcagcctgctcagttgcatcgtctgttttatctccctgtatcccagttcgatttcccagcgatgactgtacagatccgccatttctcctccggggaagcgcatggcgtccgtcatcgacgtcagcagatggcagacttttcctttgcgcgtcacggtcagcaggcgggctgtcacttcatttcccagtcccggccacttttttcgtgcctgcgggctggttttcagcttcaccagatgatcgcctttacccagttttctgagctcttcatattgcgctccctttctgagaggtatcatccagtggcggtgttctcccgccaggctccaggcatttaacagtcccagtgagtaataacctttatccattaacgtcagagtgttatcgccggtttgttctataagttgctcagcaagctcattttcgctgttcttcatcgtgccgaaggctgcagccgtcagcagatggctggtcagttccatctggcagaccattttgacctgcgggtagagcgccgggttcccggcatgtgtctggcgggggaaggctgcatcgttctctggtgtatccggtgtgcgccagaacacaccatcgatggccagcagggtcaggccgcaccagtgcggatgcggcgtggcgttatgccagagctgcgctgttttcgtgaacacgcggcggacagcctcacttcccaggcgctggcgggcctgaataacggcactgggggcaacgaaggggcgattgcccggcagcatgatgtccaggcgattcacaatctggtgaagaggttctttacgctcaagcgccatgccaacaatacaccagaccatcatttcgaggggaagacggcgcttgcgtagcgttacagtacctgattcggcaaggcaacgagagatgagttcggggtcgaggtaatcccccagagaagtcagtgggttacgcagagaatcgtaacgggataccagatcaagagcctgtccaatgtgcataaaaaaatccggaaacaagtgagcgtttccggattcttacacagccactggatcggtcaactgatccttaactgatcggcattagggcaaaggaggtgtttttcaccttctggtaaggtttgatccagtcaagaatttttccctgttcgccccagaaggtatcaggtacgttaatagattgttgatacatcgcctcgtactgctgagggtttatcaggcaacggtctgcgatgttggcaggaatggtgtgtttgtgaatttggctcatgcttttgttctccttgtagggtgttaataatatgtggcataagcgttaaatgtaggggtattggcagttttgtttagtatttgggcgacagatcacgcaaaagtagaattgtgcaaataaacggcagggtaatttttgaaggtcagcaacaaaagttgattaattctttgaggaacatgcagttatgcattgctgttgaaaaagaggaagatactaactaactctaaagtggtattttacatgcacttacaattgattaaagacaacattcacagtgtggttatttgttacacataggggcgagcaatgtcatgacagtgtaggtgcggttactgtcgtgaaaaacaataaaaaccgccattgtaacaatggcgcaattcggatgaagcccctatgacaaggataaaaataaacgcacgccgtatcttcagcttattgattccttttttctttttcacttctgttcacgctgaacaaacggcagctcccgcaaaacctgtaactgtggaagcgaagaatgaaacctttgccccgcagcatcccgatcaatatctctcctggaaagccacctcggaacagtcagagcgtgttgacgccctggcggaagatccacggctggtgatcctgtgggcggggtatcccttctcgcgcgattacaacaagccgcgtggacatgcctttgctgtgaccgatgtgcgtgaaaccctgcgtaccggtgcgccgaaaaacgctgaagatggtccgctaccgatggcgtgctggagttgtaaaagcccggatgtggcgcgtctgatccagaaagacggcgaagatggctacttccacggtaagtgggcgcgcggcggcccggaaatcgtcaacaacttaggttgtgccgactgccataacaccgcctcaccagagttcgccaaaggcaaaccggagttaaccctttcccgtccgtatgcggctcgcgcgatggaagccattggtaaaccttttgagaaagccggacgtttcgaccagcaatcgatggtttgcggtcagtgccatgtggagtattacttcgacggcaaaaacaaagcggttaaattcccgtgggatgacggcatgaaagtcgaaaatatggagcagtattacgacaaaattgccttctctgactggactaactccctgtcgaaaacgccaatgctgaaagcgcagcacccggaatatgaaacctggacagcgggcattcacggtaaaaacaacgtgacctgtatcgactgccatatgccaaaagtgcagaacgccgaaggcaaactctataccgaccataaaattggtaatccgtttgataacttcgcccagacttgtgcgaactgccatacccaggacaaagctgccttgcaaaaagtggtcgcggaacgtaagcagtcgattaacgacctgaaaatcaaggttgaagatcaactggttcacgctcacttcgaagcgaaagcagcgctggatgcaggcgcgacggaagctgaaatgaagccaattcaggacgatatccgtcatgcccagtggcgctgggatctggcgatcgcttcccacggcattcatatgcacgcaccggaagaaggtttacggatgctcggtacggcgatggataaagcggcggatgcacgcaccaaactggcgcgcctgctggcgaccaaaggcatcacccatgaaatccagatcccggatatctcaaccaaagagaaagcccagcaggccattggcctgaacatggaacaaatcaaggccgagaagcaggacttcatcaaaacggtgatcccgcagtgggaagaacaggcacgtaaaaacggtctgttaagccaataaccccgttccgcctcgcaaggggcggaaaacacaatggagtgaatatgagcgtattacgttcgttattaactgccggggtgctggcgtcgggcctgttgtggagcctgaacggaattaccgctacccctgcggcgcaggcatctgatgatcgctacgaagttacccagcagcgtaacccggatgccgcctgtctggactgtcataaaccagataccgaaggtatgcatggcaaacatgcttccgttatcaacccgaataacaaactgccggtcacctgcaccaactgtcacggccagccatcaccgcaacaccgcgaaggggtgaaagatgtgatgcgctttaacgagccgatgtacaaggttggagagcagaacagcgtctgtatgtcctgtcatctgccggaacagttgcaaaaagcgttctggccgcacgatgtccacgtaaccaaagtggcgtgcgccagctgccattccctgcatccacagcaagatacgatgcagacgttaagtgacaaaggacggattaagatttgcgtcgattgccacagcgatcagcgcaccaatccgaactttaacccggcgtctgttccgttgcttaaggagcagccatgacctggtctcgtcgccagtttctcaccggcgtcggcgtgctggcagccgtcagcggcaccgcagggcgcgtggtggcgaaaacgttgaatatcaatggggtgcgttacggcatggtgcatgacgagtcgttatgcatcggctgtaccgcctgtatggatgcttgtcgggaagtgaacaaggtgccggaaggcgtctcgcgcctgacgattattcgtagcgagccgcagggcgaatttcctgatgtgaaatatcgcttcttccgtaagtcttgccagcactgcgatcatgcgccgtgcgttgacgtctgcccgaccggtgcgtcttttcgtgatgccgctagcgggattgtcgatgttaatcctgatctctgcgtcggttgtcagtactgcatcgccgcctgtccgtaccgcgtgcgctttatccatccggtcacgaagacggcggacaaatgcgatttctgccgtaaaaccaatttgcaggccggtaagctgcccgcgtgtgttgaggcttgcccgacgaaggcgctgacgtttggcaatctggacgatcctaacagtgagatttcgcaactgctgcgccagaagcctacttaccgctacaagctggcgctgggaaccaaaccgaagctgtaccgcgtaccgtttaaatacggggaggtgagccaatgacgcagacttccgcatttcattttgaatcgctggtgtgggactggccgattgccatctacctgtttttgattggtatttctgccggtctggtgacgctggccgtgctgttacgtcgcttctacccgcaggcgggcggtgcagacagtacgttgctgcgcaccacgctgattgtcgggccgggcgcggtgatcctcggtctgttgatcctcgtcttccacctgacaagaccgtggaccttctggaagctgatgttccactacagttttacctcggtgatgtcgatgggggtgatgctgtttcagctctacatggtggtgctggtgctgtggctggcgaaaatctttgaacatgatttgcttgccctgcaacaacgctggttgccgaagctggggatcgtgcaaaaggttctgagcctgctgacgcccgttcatcgcggactggaaacgctgatgctggtgttggcggtgctgctgggggcttataccggctttctgctgtcggcgctgaaatcgtatccgttcctcaataacccgatcctgccggtgctgttcctcttctccggcatctcgtccggtgcggcggtggcgctgatcgccatggcgatacgccaacgcagtaacccgcattccacggaagcgcactttgttcaccggatggaaatccccgtggtatggggtgaaatcttcctgctggtggcgttttttgtcggtctggcgctgggcgatgacggtaaagttcgtgcgctggtggcggcattaggtggcggtttctggacgtggtggttctggcttggtgtcgccgggctggggctgattgtgccaatgttgctcaaaccgtgggtcaatcgcagttccggcattcctgccgtgctggcggcgtgtggggccagtctggtcggcgtgttgatgctgcgctttttcattctctacgccggacagttgacggtggcgtaagccagaaaagaggtggtttctggacgtattccttcctgaagtcggttttctggcgttgttgttaagtctcggggtcaacgtgttgaccccgttgacggcctttgcgggagtgcggttgcgctggcctgccatgatgcgactcacttgcatcggcattctggcgcagttcgcgctcctgctgctcgcctttggcgtactgacgtattgttttctcatcagcgatttctcggtcatttatgtcgcgcaacatagctatagcctgctgtcgtgggaattcaagctggcagcggtgtggggcggccatgaaggttcgctgctgctttgggtgctgctgctttccgcctggagcgcgctgtttgcctggcattatcggcagcaaaccgatccgctatttccgctgacgttagccgttttatctctcatgctcgccgcactgctactgtttgtggtgctgtggtccgatcccttcgtgcggatatttccaccagcaatcgaaggccgcgatctcaatccgatgctgcaacatcccggtcttatctttcatccaccgctgctttaccttggctatggcggtttgatggtagcggcgagcgtggcgctggcgagtctactgcgcggcgagtttgatgcggccagcgcccgaatttgctggcgctgggcgttacctggctggagtgcattaacggcggggatcatcctcggttcctggtgggcctactgcgaactcggctggggcggctggtggttctgggatccggtggaaaatgcctctttattaccctggctttctgccactgcgctgctgcacagtttatccctgacacgccagcgggggattttttgccactggtcgctgttgctggcgatagttactctgatgctgtcgctgctgggcaccttaattgtccgttctggcattctggtttcggttcatgcgttcgcactggataacgtccgcgccgtgccgttgttcagcctgtttgcactgattagccttgcgtctttggctctgtatggctggcgagcgcgggacggtggcccggcggtgcgtttttcggggttatcgcgggaaatgttaatcctcgctacgctgttgctgttttgcgcagtgctactgatcgtgctggtgggaacgctttatccgatgatttacggtctgctgggctggggacgcctctccgttggcgcgccgtattttaaccgcgcgacgttaccgtttggtctgttgatgctggtggtgattgtgctggcgacgtttgtctctggcaaacgcgcgcagcttccggcgctggtcgctcatgcgggcgtgctgttatttgccgcagggatcgtggtttccagcgtcagccgtcaggagatcagcctgaatttacagccgggtcagcaggtgacgctggcaggatacaccttccgttttgagcgcctcgatctgcaagccaaaggcaattacaccagcgaaaaagcgatagtggcgctgtttgaccatcagcaacgcattggtgaattaacgccggagcggcgtttttatgaagcacgccgtcagcaaatgatggaaccgtcaattcgctggaacggcatccatgactggtatgcggtcatgggtgaaaaaaccggagcggatcgttacgcttttcgtttgtatgtacaaagcggtgtgcgctggatctggggtggaggattgttgatgattgcgggcgcattgttaagcggatggcgggggaagaagcgcgatgaataaagggcttctcacgctactgctgttatttacctgttttgcgcgcgctcaggtcgtagacacctggcaattcgccaatccgcaacaacagcaacaggcgttaaatattgccagccagttacgttgtccgcagtgccagaatcaaaacttactcgaatccaatgcgccggtggcggtcagtatgcgccatcaggtttatagcatggtgtcggaggggaagaacgaagtcgaaatcattggctggatgaccgaacgctacggagattttgttcgctataacccaccgttaacgggtcagacgctggtgttgtgggcgctgccagtggtgttgttattgctgatggcactgatcctctggcgagtgagggctaagcgatgaaacagcctcaaataccggtgaaaatgctgacaacactcacgatattgatggtattcctctgtgtcggcagttatctgttaagcccaaaatggcaggcggtacgtgcggagtatcagcgtcagcgcgatccgctacatcagtttgccagccagcaaaccccggaagcgcagcttcaggcattgcaggataaaatccgcgctaatccacaaaacagcgaacaatgggcgttactgggcgagtactatctgtggcaaaacgattacagcaattcgctgctggcgtatcgtcaggcgttgcaactacgtggtgagaacgctgaactgtatgcggcgctggcgacggtgctttattaccaggccagccagcatatgaccgcccagacttgcgcaatgatcgacaaagccctcgcgctggactctaacgaaatcaccgctctgatgctgctggcttccgatgcgtttatgcaggcgaattacgcgcaagccatcgaactatggcaaaaagtgatggatctcaactcaccccggatcaaccggacacagctggtcgagtcgattaatatggcaaaactgttgcagcggagatcggattaatcatctggtgatgaagattatgtcattgagctgcataaaaaataatcgaatgaacatatgccaaaaataatcactaatcagtattattgcagattaaacaaataaaaatctttccataacaaatggttattcattaatcctgccataaactcgcgttattatgcattaatgcagcgaaaagctctgttgttaaagggttgcgcaacataccgcgcaaatgatactgatcataagcgttaaaaaaatctacaaaccaacgcaacacaattcatgccctggcagtatgtcacgttctcgcgtttctgaacggggaacggcgctccattgaggaagttattctgatgaaaaatataaaattcagcctggcctggcagattctgtttgctatggtgctgggcattctcctgggaagctacctgcactaccatagcgacagccgcgactggctggtcgtcaatttgctctctccggcgggtgatatcttcatccatctgatcaaaatgattgttgtgccgattgtgatctccacgctggtggtgggtatcgcgggtgttggtgatgccaaacagctcgggcgtattggcgcgaaaaccattatttacttcgaggtgatcaccaccgtcgccatcattttggggatcactctggcgaacgtcttccagcccggtgccggggtggatatgtcgcagctggcgaccgtcgatatctcgaaatatcagagcactacggaagcggtacaaagcagttcccacggcattatgggcacgattttgtcgctggtgccgacgaacattgtggcgtcgatggcgaaaggcgaaatgctgccgatcatctttttctcggtgctgtttggtctggggctttcttccctgcccgcgacgcatcgtgaactgctggtgaccgtgttccgctccatctctgaaaccatgtttaaagtgactcacatggtgatgcgttatgcaccggtgggtgtgtttgcgctgattgcggtgacggtggctaactttggtttctcttctctgtggccactggcgaaactggtgctgctggtgcatttcgccattctgttcttcgcgctggtagtgctgggaattgtggcgcgcctgtgcgggttaagcgtctggatcctgattcgtattctgaaagatgagctgattctggcgtactccactgccagctctgaaagcgtactgccgcgaattattgagaagatggaagcctacggagcaccggcgtcgatcaccagcttcgtggtgccgaccggttactcttttaaccttgatggttcgacgctgtatcaaagtattgccgctattttcatcgctcagctgtatggcattgacctgtccatctggcaggaaatcattctggtgctgacgctgatggtgacctcgaaagggattgctggcgtgccgggcgtgtcgtttgtggtgctgctggcaacgctgggtagcgtaggtattccgctggaaggtctggcgtttattgctggtgttgaccgtatcctcgacatggcgcgtactgcgctgaacgtggtgggtaatgcgctggcggtgctggtgattgccaagtgggaacacaaatttgaccgcaaaaaggcgctggcttatgagcgtgaagtgctgggcaaatttgataaaactgcggatcaataattgaagattgccggggatatccacccggcaatgtgtgaatgcctgatgcgacgcttgccgcgtcttatcaggcctaccttaaccgttggttaatttttcaaactcttcacacccggtatcaaacccttccatacagctcaggttcaaccagtgcagcgccttttgcttgttcttctcgataaaaccttcttcaccgtttaagaacatcattcccgcccagtactcggaataaccggttcgggaaattgcagagctgcgtttgaaataccaggttgccttgtcatcgtcggccttaatgcccacgccgttggcgtaaatcaaaccaagcagcatttgggcatcgacggcagagtcgttctccagatcttccgaggcgttttctaacagcgaaatagcctttggataatccggtttacccgcttgagtatttaccagaatatgcgccagcgttacttcaccttctttactgcccgcttgcgccgctttctctgcaagaacttttgcttgtggatagtccagactgaccggattggtgattttgatctgcgccagcagcgcgcaggcatcagcatcaccgctgtcggcggctttctgtgcccaatattcggctttgctcaaatcgccggagctaaaccagctgtcggcaagaaaatattgtgcgcgtcggtccccggcctctgctgcctttaaatactggctgccaggctcggagtcgttggcgtgggcaaagaatgtcaaaaacaacatcaatgcgataatttttttcattttgataatacgattgggtagggagtaaccagtataaagagttcgaatggataaaaaaacagcctccgaaaggaggctgtagaaaggactgtattacgccagtgccgcttcgcgcaggcgagttttcaacttgttgtactcgtcaatcacgtactgctcggcggcgcgctgatcggcgatcggctcgacgcgcacggcgcagtatttgtattccggcgttttcgtaatcgggcttaagttttcggtaaccagctcgttacaggcaccaatccaccactggtaggtcatgtaaatcgcccctttgttcggacgatcgctgacctgcgcacgggtgataattttgcctttacgcgagtgcacccaaaccaatgcctcatcttcaatacccagacgtttggcgtcttcggtattgatttgtgcgtagccaggttcatcagccagcgccgccagtgccgcacagttaccggtcatcgaacggcaagagtagtgaccaacttcacgcaccgttgacagtaccatcgggtactcgtcggtgagtttgtcgattggcgctacccagtcgcaggtgaagaactgcgccagaccgttcggggtatcaaacttctctttaaacagataagaagtcccctgatcggcatctgaagtatcgcggcaaggccactgaatgaagcccagttcgcccattttctcgtaagtcgcaccgtagaaatccgggcacagatgacgcaactcatcccagatctcctgggtgttgttgtagtgcatcggataacccatacgggtggcgatttcactgatgatttgccagtccgttttcagatcccatttcggttcaactgctttgaagaaacgctggaagccacggtcagccgcagtaaacacgccttcatgctcgccccacgacgttgacggcaaaatgacatccgccgccgacgcggttttggtcataaagatgtcctgaacgataaccagttccagatcttcaaaggctttacgtactgccgacagctccgcgtcagtttgcagcggatcttcgcccataatgtacgcggcacgcacttcgccatgcgctgcgcggtgcggcagctcgctgatgcgataaccggtatgagcaggcaggctttccacgccccaggctttggcgaatttctcgcggttagccggatctttcacgtactggtatcccggatacgtatccggcagcgcgcccatatcgcaggcaccctgcacgttgttctgaccacgaaccgggtttacacccgcatgcggcttaccgaggttaccagtcagcatcgcgaggctggtcagagaacgcacggtttccacgccctggtagaactgggttacacccatgccccacaggatggcggcgcttttcgcctgggcatacatccgtgccgcctgacgaatctcactggcgctgacgccggtgatatcttcaaccgactccggcgtgtagccttcaacgattttacgatactcttcaaagccttctgtacgggaagcgacgaacgctttgtcgtacagattttcttcaataatgacatggcccatcgcattcaacagcgcgatgttcgagccgtttttcagtgcaatgtgcatgtcagcaatgcgcgcggtttcaattttgcgcggatcgcagacgataattttcgccccgttacgtttagcgttaattacgtgattcgccacgattgggtgggaatcagccgggttgtacccgaaaacgaacactaaatcggtattatcaatttcgttaatagcattgctcattgcgccattaccgaccgattggtgcagacctgcaaccgatgggccgtgtcagacacgagcgcagcagtcaacgttattggtaccaataacggcgcgcgcaaatttttgcattacatagttggtttcgttacccgtaccacgcgaggagccggtcgtctggatggcatccggaccgtacttctctttgatggcgctcaggcgctcggcaacgtaattcagtgcctcatcccaggaaacaggttcgagtttgccgccacgctggcgacggatcatgggggttttcaggcgcggggtcaggatctgggtatcgttaatgaaatcccagccataataacccttcagacacagggtaccctggttggttttcccctgcgctgcctccgcccggacgattttgccgttatcgacgaccaggttgattttgcaacctgatgcgcaataggggcaaaccgtgacgacttttttcatcggtctcgctccagttaatcaaatcacgcatacgcgctctcgactacagtatgcatcttttatgccacattttatttggggtcattccctgatattacgggcactatttattcaaaactctgacgaaaaacaggctgtcgtcagttttgacgtgacgaaacgaaataccgcgtgacagccatcacgcggcagacattttattttttctcgacgacgggagccgcctgatacccgccgcccagcgatttcatcaactgaatgctttggatcacccggcggctgtccagcatcagtaatgacatctcttcggcaagtactggcaaccgggcttcagtggcctgtaagcggctggttaagccgcgctgataggcggcctcggcagcgcgctgggtgaagcgcgttgcttccacgcgttcagcctgcatttctcgctcgtcgttgagcgtttgcagacgcgtgccgttgacggcaacgtcacgcaccgcgttcagtactgactggttgtaacgttcaatcatcatgttgctggcggcgcgcgtgccttcgagattggcattcaaccgtccaccgtcaaacagcggcaatttcagacccgggatgaagttgaactggcgactggtttttttgaataaggtatccaggtggatggcatcaaggccgaaaaacgctttgatatcaaagctcgggtagaacagcgcccgcgcggaatccacctgatctaatgacgcctgaacataccagcgcatggcttgcagatccgggcgtctggcgagcaactcataagagagtgtcgccggaatgccggtctggactcgtggtaatgccaccggtttgatctccggcatatcgctggcccccgcgccaatcaatgcacgcagagattctcgcgtttcggtgatttgccctttgacggcagcaatttgtttatcgaccgccagaatctgtgcccgcgcgccgtggaaaggcacttgtgcttccagaccgtgcgccactttactctggtgcgctttcaccgcgtaatcaatcacatcgcgagtttgttctaacagatcgagcatctgatagctggcctgcatactgtaataaagctgcgctacgcccgtggtcagcgatagctctactgctgcggtttctgccagcgcggcattatgcgcgccaatggcggcggcaaccgctgagcgatgcacaccccacaaatcaagatccagtccggcaaacaaacctactgtggcttccgtatagtacggcccgtccatacccagtgcgggcgcatccatcgcataagggcttaaaaagccgttcgccgagacgcgttggcggttgagcatccctaacgctgcgacctgtaattgtgaaccggcatctaacaaatcggcctgggactgcgctttttcttcccgcagtttcgcttcggcgagggtgtgtgaaccacttagcgtccgttggatcagcgcatccagctacgggtcattgagttgtttccaccactgcgcctgcggccagccggagctggcaagatgaatatcatcggccagtttgatttgttccggtttgagctgttgatgaggcgcagaatccttgcgtaccaaggcacagccggaaatcagcgtcgtgctgccgagaatgctgcacaacagcagacgtgaaagttgacgattgatcattgcgtggctccttgtgcctgttccgtggcgggcgttaatgccggggctgtccagtctggcaagcgggcgaaaagctggcagacgtgttgctcctgttttaataaggtgggcaggatggcctgcgaggcgggtgtctcttcaagcgttatttgaggagaacggctgagtgcggttgccagaccggcagcgtatttttccagggcgtcggcaaactgacctgctctgtccggctgtagtgcgttatccagcgcctgcgccgaattccaggtggcatcccaggcgtgaaggatatcgcggccctgacgaataaccgtttgcgaacgttcaatcagtaaggcgcgttcttcgctgtccagttgacgctccagcgccacgcgttggcacatctcttcacaggcattaaacgccgcatgcagaccgatacgaatttgcagataagtgcgcagagccgtgacttcctgctggcgtgggatccgcattactttacttaacatacccagcgcgccagccagtttttgcggcagcgtgcgcgcttcactttcaggccagacaaaggtgtaaatcaccgcggacaccacggtaccaatgatgatacccagggcgcgatcgcgaatttccaccaggtcgtacactgggccaaaaacgttttcgagcgtggcgagcgcgaaggtgaccaccatctgtgtgccgatataagaagagcgttcagagctggtggcaatccatgcgcccaacaggaaaatcggtgccagcacaaacagcaattcgacaatattgtccagccagggcatgaccagtagcgtgaataacagcgccagaatcgcgccgcaaaaggccccgccaaaacgcagcaccatcttctggtacgacgaaccgacatttggattagagacgatcacgcaggtcagcatacaggtgtgaatgccttcccagtccacgccgctgtaaaaggtgtaacagatcaaacaggcgagcaatgtttttaccgcgtagcgtatatagtctggattggtaaaagcatcggcgaccattgatggcggtttggcggcgggcgttggcggcgtattcgggttcatctggcccagttgtaacaacgtctggcagatattctccaggttacattcccgtgccgccaccgcttcactttcactgatccgccagtcgctttgccagcactgaccttcagcaacggcatgctgcagcttgttgatttctgaggctaatttttgccgaaattcaataattgcctgagaatcagcaaaagaggtgggatcgtagcgattcagcgtcgagtaaatgtaggttaccgttgccacgcagctttgccaccatgcgctttgagttcgccagttggcatcgtccgcgagacaaaagacattcagtttttgcagcgccagcgcctctctttcaatccgcgtttcgggtagcggtgcgaggctgtctgtcaggtgactaatggcatcatcaagccgatcattaagcgcctgatgcatttgcgaaatggcacgactgggaaaccacagcacgccgattaacgtcatcagcaaggttggatagaggccaacaacgatacaccacagcgttaagcgcacgaccacttccggatagtcgagcatggcggggaaggtttgcccgtaaatggcgacaatggcgacagcgaaaaagaccagtcccagccgatgggtgcgcatcaaaaacatgcggcccatcaggatcggcccggcgatgatcaatcggatcaacggttcgccgtatgaccatttgtagatcaaaaacaggctgccgatctccagcaccgtggcaaccacaaacaagatcgccacaaatttggtgtaaaacgcgttcgactgaataccgtaaaacagcactgccagcgataacgccacaaaagggatctcaaaagtcatcgagatcagaatcaccagcaggcagcctacccagagttgcacgatctgcggcacgcggccgggtcgccgctcgcttaactcttcatgaaagaacgccagcagcctgaccatcggtaatggcagggagttgagcgcgctcattattgcggctcaagattagcgactgccgaagcgccgatgcggaacatttccgggtcaggtttatcgaccatgattttgaccggaaaacgctgggcaacgcggacccagttaatagagcgagaaactttcggcaggccgcccagcaccaggccgccgtcatccggtagcacgccgtagccaatcgaatccactttaccctcgaaggttttgccgctgtcactcatcaggcgaatcgttgcgggtgtacctgagcgaatatttttcagatcggtttcgcggaagttggcgatcacgtaccagtgacgagtgtcgattagggtaaaaatagggcgcatggcagaagcaaattgcccgacggaggttttgagggaaatgacccggccatcaaacggcgcgcgaacggtcgccatttccagatgcagtttggtcagggcaatatccgcttcgaccgccgcacgttgcgccaccagcgcatcgacgccgctgacggcgctggcggctgactgcgcctgtaacaatacggcattaagatcggcttctgcggcgcgctgcgcagttcttgcacggtcaacgtcttccgctgagacaaaaccctctttcagtaatggctcggtacggcgtaatgtatctgtggcctgtttcgcggcggcacgggctttttctaccgtggcattaatcgagtcggcaccaaactgttgcgcatcaacgctacgctgggtgagcataatttgcttatccagcgccgcgagggaggcttcagctttcgccagattggcttcgtacgggcgcgggtcaatgcggaacagcaaatcgccctgtttgactgcctggttgtcggtgaccgccagttctacaatgcggccgctgacttccggcaccacatcaatggtatctgctgacgcgtaagcgtcattagttgatggcgcactgtctacgcgccagataacgaaaacaagggcaaccagcgccaatgcaaccactaacagagcagggaatttactgcgaggagcttttttcggcgtactttccatgagcgcgtctcaaatagattagaaaaatgccagccagaacagcatggcgtagagagcaaaaagggcggtataaataattccgacaaatgccagattgatatttgcccgctgaataactcgcctcgtgatgagcatcaaaataaggctggcaatggcgcagaaaaaccagctgggataataagcaccgatcaccgggattgccggagataatgagcatcccgaaaccatgaagacgggaattatccaggctgtttttttgagttgcatcgccatgcgagagagaactgttggcatattaaatacatcctgtctgctgcgaacaatatctgtagtgaatatcaatatccattgaaggcgtcagtatggctattttctcgatgaataaaaatagctttattcagtcaccgcattcataacttatatattttatttattaattggctgtatatatttttaaaataaatgcttttgggggcttcagcgcccccaaaagcgagtgacattaatttggggttacgatattcacccacaaatcgaaattatccagacaggcgataatttcttccagtttcgcgccattgccaataattttggctttcttcgcttttaccagatccgccattttggcttgcccggtcagcacggcgtgcagatcttcacggctgatgtagaaagaggcgtcagcttgggattgcagtgttttacggtagttaagcacgctatcgttcagcgtcaggttgaggttatcgccattgctcatattgaagttcaggctgatatttttacccgcggctttcgcgctatcgaggcgaacggacataaagtcgaacagcatttcgaccgacatcccgcgaatggtgtccggggaaccgatggtgccgtggctgaacttatgcaccccttcgcgcagctctttcgcgccggtcaggtagaaaccgcgccaggtggcggactcggcctgatagcccagctgttcaaagttattcgcttgcagattcttcgcgacctggtcacccgggttggcggcaatcacctgtttcagcagttctgccgaccagcggtaatcaccttgcttgttcgcttcttgcgccaggttgatgacacgggcagaaccgcccagcgcctgcacgtaacgtttacccatctccacctgaccatacggatgcaggttagccgggttaccgtcgtaatagccaagatagaagttatacaccgcgcgggcgttgtggctgacagaaccgtaatagccacggctggcccagttattggcaagtgcaggcggcagtttaatcatgtcgccgatttcattcatggtgtagccctggttcgccaggtgcagggtctggtcgtgaatgtacttgatagtatcgcgatatttaccaatataatcattgatatgcttattgccccagaccggccaggtgtgcggcataaacaggacttccgcgtcgttaccccacatatccagcgtttcgttcagatactcggtccacttgctggtgtcgcgggttttcgcgccgcgcagagtgtagaagttgtgcagggtatgcgtggcgttctcggcggtacacagcgctttcagggccggaatatagaagtgcatttcggctggtgcttcgctacctggggtcatcaggaagtcaaactccaggccgtcgataatcatcttctcaccggttttggtgatggttttgttcggtgcgatgatgctcgggtagcccgatgccagcgttacgccaagaccattgccgatgttaccctgagggttatgcgccagcagcaggccgtaggagtaaagtgcacggcggctcataatattacccgccagtacgttttcgctgatggcttcgtccataaagccagcaggggcgataacctgcactttaccggatttcacatcagcttcagagataatgcctttcacgccgccatagtggtcggtatggctgtgggtataaataaccgcaacaatcggtttttgcgggcgattttggaagtaaaggtcaagggcggcttttgcgctcggtggcgtcaccagcgggtcgatgacaataatcccggtatcaccttcgataaaggtgatgttggagatatcctgaccgcgaacctggtacattctgtcggtgactttaaacaggccggaaataccgtttaactgcgactgacgccacaggctagggttaacggtttcgggcgcgggcgcattgatatcaaatttataatcttccccgcgataatatggtttgccattagcatcgcgcagaataccttcatccagcagcggagcgataaatccacgctgagcgtcgtcaaaatcctgacgatcgctaaacggtaatgatttggcgtaattctgattaacctgttgggtatattgagtggcggctttcgcttcctctttcgcgttagcggtatttaccatcatgccgctggcggcagttaacgcaataacaattctgctcaaacggaataaccgagagttattcatgtaaatctccatttatcatttatgtcgtaaatatgtaatccatgcaaaatacgtcatttaaagctggggttatcataattgggaatttgcgactttaataagtggaagtgtgagctgaacgatccattttattaggcatttgtgctgaagagggaaaattacgcgaatttattatctctgtaaataatatgaggtgttttatatatttattatatatattgtacttcggcaaatactgagcacaatttatcaatgcaaccggtgtttctttttaaaaaacgtaccggagcaatgggcggtcatgtcgctggcaccgcaggattctgcgttgctgtgccagccttttattcatggtcaatgagtgaggtgattgataaagacaccaggtcgtcagagcgcactgattatccgcattatgccagtgaagttgcactggcttttggttcacgagtggttggcctcgaactggcaaaaatgattgtggatgcgtggctgggcgcacagtacgaaggcggtcgtcatcaacaacgcgtggaggcgattacggcaatagagcagcggagaaattgagattcatccactacttgcatggatgagtaatgactaatgtggatagagtttctttttgaggttggctaatgaaacgctttccgctatttcttttattcaccctgctcacgctgtccaccgttccggcccaggctgatattatcgacgatactattggtaatattcagcaggcgattaatgacgcttataaccctgaccgtgggcgagactatgaagattcgcgcgacgacggctggcagcgtgaagtgagcgacgatcggcgcagacaatatgacgaccgccgccgccagtttgaagatcgccgcaggcagctggacgatcgccagcgccagcttgatcaggagcgtcggcaactggaggatgaagagcggagaatggaagatgagtatgggcgatgaggttgggtatggagcaggcatcgcccctcaccccaatggggagagggagaaaacgagcgcaatattcaatatcgagcacaatcggtcccctcgcccctctggggagagggttagggtgagggggccagcgcgcacattccctctcatcacgccaccccaatctccatcccatcaaaccccacctcaaaccctgacggtagtgcgttttccatcagccacgcatcaaactggtggctgatatgggtcagaatcacccgtggcgagcggataacctgattcagcgcaagcacggtatttaaatcacagtgattacgcggtgcatccgcgcgcggcgggtgactgcaatccatcaccattacctgcggctgattattgcgtaaaaatttcagcgttttttccggcaagccagcggtgtcagacagccacgccacccggctgtgcgccgtttccagtaaatagccgaaagtgagttttgagtggttaagcggcagcggcgtgacctgcaacccctgcaaatcaaacaccacaaacggttccaccgtgtggctgaaatcaagcagcccgggatgtttaaacagatcgtcgcagccctgttcatccggcgggccgtagatcgggatcggatcgcccacgccccagcgcagcggaaacagcccctggacgtgatccatatgataatgcgtcagcaaaaactgctggaacgatccgggagaccagcgatcggtgagatcgtgcagcccggcgtcgatcagggtgatcgcctcgttaaacttcactacgccgctgcacggttggcggcgatactgcggcgagcgccgcgctcggtcgcaggccgcgcactcgcagccccatgccggaacgccctgtgcgccgccggtgccggtgagcgtgagggtcagactcatgttacagcgccttggtgaagcggaagtgactctgctcgtagccttctcgcagatagaaacggtgcgcgtcgtggcgcttcacgttggtcgaaagctcggtcatttcggccccggcctggcgggcttcttcttctgcccacgccagcaacttgctaccgacgttcaggccgcgcgcctgcggcatcactaccagttcctgaatttcgccgatccagttgacatgatgcagatgaaactgcaaatgcaggccgatcatgccgacaacctcgccatccagcagcgccagatgatagcgcatgttcgggtcgcgcagattggcgctaaagcccacgcgaaatgcgtggtggtcaaactccgcctgttttagctcacaaatcagcgcgtaaaccgcgtcggtatcatactgcgtggccgggcgaagctcacaagcaggcatggtgtttctccttctgatgaatcagcgtcagcagcgtgtcgaccgactggcgcaggctgccgtcattgttgagcgtatggcaatcctgtggagtatagcgggcggcgcgcgccaggcgggcgttaatttcactggcgttttcacggccacggttttccaggcgctggcggaggatctccggcgaaacctgtaaacagacgggcagcagcgccgattgatagcgcgcccgcgcctgcggcagatgggcgcgtgagccgttgaccagcacgtcgaatccggcgtgcagccagaggtcgatctcgacgccgacgccataatacagaccgttagcgtgccagcttaaggccagtaggttctgccccgcgcgggtaaaaaactcctgctcgctcagagcgatatggttttcgcttccggcgctggcgtcgcgcgtgatgtagcgatgcgccaccagtagctgagtttgttcccgcaggcggagttccgccagcaggctatctttcccggagccggacggccccattaaccaaatcagttttcccatcatcagaacacccttttaccctgacgccagacgtggtcgatatgaatgtgattgcccttgcgatgcgccagcaccaagtccgcgcgtttgccctcgccaatcaccccgcgatcctggagattaagcgcctgcgctggatttttagtcaccagcttcaccgcctgcggcagcgtaaagcggttgctctcgtcatcggcgacgcgaaatgccgcatcgagcaggctggcggggtagtagtcggaagagaggatatccagcaggccaagctgcgccagttcactggctgccacgttgccggagtgcgagccgccgcgcacaatattcggcgcgcccatcagcacgttcatgccatgcttgcgcgaggcttccgccgcttcgaacgtggtgggaaattcggcgatcacgctgccaagctggtgagattcagcaacgtgggcgtgggtggcgtcatcgtggctggcaagcgcaatttttcgcgcgcggcacagggcggcgatggattcgcgattcggctgcgaccagcgtgcggcgagcgccagttgctcttcttcgtactgctgcatctgcgcatcagtgagggagtatttgccctgataatattcgcgatacttctcgcgattggcgaactggcgctggcccggcgagtggtccatcagcgacaccagcgtcaccggctcgcgctgcaccagtttttcaaacagcggcagcgtggtgtgatgcggcagttcgcagcgcagatgcagacggtgctcggcgcggttgacgccgcgtttctgcgtctcttcgatggcgttgatcatcttctccagattcaccagccgatcgccgccgtcgcgcacgtcgccaattgccacggcatccagtacggtggtgatgccgctcgccaccatcagcgcgtcgtggctgctcatcgccgagtgggcaggccagtcaactttcgggcgcggggtgaagaatttatccagattatcggtatgcagctcaatcagccccggcagcagccagccgccttcgccgtccatcgcctccggcaggcggctctggctttcggcaaaggcgcggatttcgccgtcctgcacctccagtgaaccgtgtaccacttcgttttccagcaccaatttgacgttattgataatcatgaagaggcttccattgggtgcaggcggtcggcaacgtcattacgtacggcttcgtcgtggaagatgccgacgatggccgcgccacgggctttggcttcgtgaatcagctcgactacggcggcgctgtttttggcgtccagcgaggcggtaggttcgtcgagcagcagaatggggtagtcgacgataaagccgcgggcgatgttgacgcgctgctgttcgccgccggagaaggtcgatggcgccagatgccacaggcgttccggcacgttcaggcgggtgagcagacgcgcggctttagcggcgcaggcttcacgcggtacgccggtatcgagtagcggctgcatcaccacttccagcgccgaaatacgcgggatgacgcgcagaaactggctcacccagccaacggtggttttgcggatctccaccactttgcgcgctggcgcggtgaccagatcgacccattcgtcaccgtgtttgatctggatttgcccttcgtcgggcagatagttggcgtacagcgagcgtagcagggttgattttccgctgccggaatggccgtggagcaccacgcattcgcccgcgttgacgatgagcgaggcgcggttgaggacgggcaggcgcacgccgttttgctggtgcaggatgaaggttttactgacgttttgtacgttaatcatttttcgcctcgtggttcgggtgtcggatgcgacgctgacgcgtcttatccgacctacggggagcgcatttgtaggccggataaggcgtttacgccgcatccggcaccggctcaattctgcaaaaccgatgacaccagcagctgtgtatacggatgatgcgggtcgtcgagcacgcggtcggttaacccactctccaccacttgcccctgcttcatcaccagcaaacggtccgccagcaggcgggcgacgcctaaatcgtgggtgacaatcactaccgcgaggttcagctccaccaccagtccgcgcagcaggtcgagcaggcgggcctgcaccgacacatccagcccgccggtcggttcatccataaacaccagcttcggatgcgtcaccaggttgcgggcaatctgcaaacgctgctgcataccgccggaaaaggtggtcggcaggtcgtcgatacggttggcgggaatctccacctcttccagccacttctgcgcggtagcgcgaatatcgccgtaatgtcgcgccccggtcgccatcagccgctcgccgatattgccgcctgccgacacctggcggcgcaggccgtcgagcggatgctgatgcaccacgccccattcggtgcgcagcaggcgacggcggtcggcctcgctcattgcatagagggaacggttttcatagtgaatctccccctgctgcggcgtcagacgcgcggagatcgacttcagcagcgtggtcttcccggagccggattccccgacaatgcccagcacttcccccggccataaatcaaaagagacatcgctaaagcctttgcccggcgcgtaaaggtgggtcaggttattgaccgaaagtaacggttgattcattggcttttcgcctcgctctgttggcggcaataatcggtatcggagcagacaaacatgcggtttccggcgtcatccagcaccacttcatcaagatagctgtgggtcgatccgcagatggcgcatggctcatcccactgctgaacggtgaacgggtgatcgtcgaaatcgagactttccacgcgggtaaacggcggcaccgcatagatgcgcttctcgcgccctgcgccgaacagctgcagggcgggcatcatgtccattttcgggttatcgaatttcgggatcggcgacgggtccatcacgtagcgcccgttcaccttcaccggataagcataggtggtggcgatatgaccgaagcgggcgatatcttcatacagtttcacctgcatcacgccgtactcctccagcgcgtgcatagtgcgggtctccgtttcgcgcggctcgataaagcgcagcggttccgggattggcacctggaagataatgatctgatcttcggtcagcggcgtttcggggatgcggtgacgcgtctggataagcgtcgcatcgtccgtacattcagtggtgtttaccccggtcacgcgcttaaagaagttgcgaatcgacacggcgttggtggtgtcatccgcaccctggtcaatcaccttcaacacgtcgctttcgccaatcacgctggcggtgagctggataccaccagttccccagccgtacggcatcggcatctcgcgcccgccaaacggtacctgataaccggggatcgccaccgcttttaagatggcgcggcggatcatgcgtttggtctgctcgtcgaggtaggcaaagttgtagccgctcagattagccatggttctgctcctgttgcagacgtttgagtagctccagttcggcctggaaatcgacgtagtgcgggagtttgaggtgcgagacaaagcctgcggcttcgacgttgtcggcatgcgccagcacgaactcttcatcctgcgccgggcctgtcgcgtgctcgccgtattccggggcttgcaacgcacggtcaaccagcgccattgccatcgctttgcgctcgctcatgccgaataccagcccgtagccgcgcgtgaagtgcggcggctcatccggcgggtcgataaaaccgttgaccatttcacactcggtcatcagcagttcgccgacgtttaccgcaaatcccagctcttccggcacaatcgacacgtcgatgtaaccactgcggatctcgcccgcgaacgggtggttgcgcccgtaaccgcgctgggtggagtaagccagcgccagcaaatagccttcgtcgccgcgcattaactgctgcaaacgggaagaacgtgaacaggggtaaaccggcggcgtgcgggtgatgtcatccggctgtgctccgctatcctcttcaaacttcgccagcccctgacgcgccagcaggctgaaaacgtgcggcgacggctgttgttcgctgtcggcggtggtcagcgtcggcgcttcgccgtttgccagcagagtgaaatcgagcaggcgatgggtgtagtcgtaggttgggccaagcagctggccgccgggaatatctttataaaccgctgaaatacgccgttcgagacgcatctccgtggtgtcgagcggctcgcttaccgccagtttcgtcagcgtggtgcggtaggcgcgtagcaggaaaatcgcttcgacgttatcgccgctggcctgtttcagcgccagcgccgccagttcgcggtcggcaatgccgccttctgtcatcacgcgatccaccgcgaggttaagctgctgttcaatctgggcgacgctcagttcgggcaaatcggtatcgccccggcgtcggctctcttgcagggcgtgggcggcgtcgatcgccttttcgccccctttcacggcaacgtacatcagcacacctccacatgagtggttcgcgggatagccagcaggcgctcgccgcaggtcaggattaggtcgatgccgagcgggaacgggtgcgggcgctcggtgagttcgtgcagaatgcactctggcagctgcggagcgatcattcgttcttcggcaatgcccgcgccggtgagacgcaacatgcgtccgccgctcaggctggcgacctgtaaaatcagcgtcgcgcccgcttccggcgcaacggcggtgtcggtggaaagggcgttgagctgttcgctggaaatcgcctcatccgtcaccgcgaaggtcgcctgttccggctggctgaccagcggcgcgttggtatgaaaacgcaggctctgattgacgatatcgttacttaatggcgtggcaagccacaccggcgtgtcgttatcggccagcgtcagcagcacgctggtggtggcgatattcagcggctgccagccgcgtttgagctgatacagggcgacaatcacgcccggctcgctcatggcctttaacaggcgacgaaaactgtgctgggcatcctgcacgggaagcataaaagcggtttccagggtcatgcgttgtctccgcgaaccatcgtaaagaagtcgacccggctggcgttcacttcggcctggcgtgcggcaatgcgtgccatacggtcagcgtccagcggggcaataagggtttctgataagttttgaaagtggcgagattgctgcatcagcgcatcaatcagcgcgcagcgttcggcgtgctgtttatcacgccccagcacccagctgtagccgagggtgccgtcagtcaggcgtacggcggcacgggtcagcgtggcgtcgccggcaaaaaagcgttcgccggtaccgcccattcgcgcctgaatctgcaccaggccagtttcggcagtgcggatcacttcatagtcggcggtgatgttcagcgcgttcaggcgggctgccagttcagccggttggctgtgcgccagtacggacatccagtgctggcgggtcgcggtatctgcgtgcattcagtgctccatagtgaattcaatcatgtcggcgcgcgtcaggctgacggagtactccgccgggctgctttcaccgtcacggtggttaagggtgcgcacgcacagcagcggcgacatattcgggatttcaaggcgctggcactctttggcctgggcgcggcgggcgctgatccgcgtctggctgcggcgcagcgcaattccggtttgctcgcgcagaaaatcgtgcagcgaaccgctgtcgaaacgttgcagtgtcggccagagggtgaggtccgcaaagtagtggtcgattaaacagagcgcgacgccgttgacgcgacgcagggtgcgcaaatggataacgttctcaccctcggtaatccccagcgcgtcagcaacgtgaccggacgcggggcgcaataccgacagcagtttttcgctggtgggatggctgccctggtccagcaggttctggctaaaacgcgcctgggcgttgagcgggtaatcgaacgggcgcatcagcaccagcacgccgatgccctgacggcgctgtacccagcctttttccaccagttggtcgatggcgcggcgcagggtgtggcggtttacctcaaagcgcgccgccagttgctgctcggcgggaagatagtcgccgcagcgatagtgttgacgaagctcctgctcaagttttgcggctatctcctgatagcgtgttgggtagctggtcggatgtgtagacaagtgcatagatatcaatgcctcacttatcagataaagtgcttacgcaaccgttgagagaggaaatccagcaggctgaccgtgacgatgataagcaccatcagggcgcaggtttgttggaactggaaaccgcgaatcgcttcccacagggtgacgccgatcccgcctgcaccgaccatgccgacgacggtcgccgagcggacgttggattcgaagcgatagagggagtaggagatcagcagcggcattacctgtggcagcacgccgtaaaggatctcttccagcttgttggcgccggtggcgcgaatgccttccaccgggccgggttcaatcgcttccaccgcttcggaaagcagtttcgagagcacgccggtggtgtgaataaatagcgccagcacgccagcgaacggtccgagaccgacggcgaccacgaacagcatggcgaagaccatttcgttaatggcgcggcaggcgtccatcaggcggcgaacgggctggtaaacccaccacggcaccaggttttcggcgctcatcaggccgaaggggatggagagaaccactgccagcgcggtgccccagacggcgatttgcagcgtgacggccatttcggtgaggtaatcctgccactggctgaaatcgggcgggaagaagtcggcggcgaaggtcgccatgttgccgccgtctttgatcagcgtaagcggggccatttccgcgccctgccacgagacgaccaacacggcgagaacaatggcccagctcagaagcgagaaccagctgcgcttgggtggggcgatggtgatggtttgcatgtttggctccgtttaatgttttctccctctccctgtgggagagggccggggtgagggcatcagcgtgcgcatttccccctcaccctaaccctctccctcaagggagaggggaccgatcgagcacattactgcaccgctttactcaccgaactcatcgcgcttaacgcgttgttcaggcggtccaggtcatccagctgcgcctgaatctcggtggttttcgccagcttgtcctgctcattcagtccgttattgctttttacgccctgaatctctttaaacagtgcgagctggcgaatcggcaccagttgcaggtcgctggaggcgcgaaacggtgcccagcccaggcgttccagcaccgctttctcttccggcgtttttccgtagttcataaagaagtcgtagatcttgtctttggtggtttcggagagattcttgcgccagacgatcggatcgcctgggatcagcggcgacttccagatcaccttcagttctttcagcttctctggcgcggaggttttcagcttgtcgaggttttcggtgttgttggtggcaacatccacctgcttgttggcgacggccagcgcgttggtttcatgcccggcgttgacggtgcgcttaaagtcgctggcggagatattgtttttggcaaagacgtagtaaccggggacgaggaagccagaggtggagttaggatcgccattgccgaaggtgagatctttccgcttcgccagcagatcgttcaggttgttgatcggactatctttgttgacgatcaacacgctccagtaacctggcgatccatccgccgcgaccgtctgggcgaagacctggccgttggcgcgatccaccgcttccattgccgacaggttgccgtaccaggcgatatccactttattgaagcgcattccctggataatgcctgcgtagtctggggcaaagaaggcgttcaccttcacgcccagcttcttctccatatcctgtaagaatggcgtccattgcggtttcaggttttgctgtgattccgttgaaataatgccgaaattcagcgccttttcctgctcttcggcgtgtgccgggcttaacagggtgctgaggctgaacatgctggtgaaggccagcgaggcaattatcttagcgttcattcgttttcctcaatgatggggatgtcaggcagctttcgcgttctcttcgatgcgattaatgctgcggtagagatggtcaaaacgttcgttatcaaactgttggctgctgccgtcgtagaaaacgtgcccctggcgcagggcgacgatgcgttcgcagtagcgcagggcgtaatccacctgatgcagcgtgacgaccacggtgatgccgtcgttctgattgatgtcgcgcagggtgtccatcacgatgccggcggattccgggtccagcgaggcgatgggttcatcggccagaatcaccttcgcctgctgcatcagcgcgcgggcaatcgccacacgctgctgctgtccgccggagagggtggaaacgcgttgatgggcaaaatgcaccatgccaacgcgggtcagcgcctgtaacgcgcgttgtttctgctcgcgggtaaaccagctaaaacaggtgcgccagaacggcgtgctgccgagtgcgccaatcagcacgttctccagtacgctcaggcggttcaccaggttgaattgttggaagatgtagccggtgttggcgcggcttttgcggatatcgcgcgccagacggccttcgcgctggactgtgcggcccagcagctcgatatggctgccggcggatttatcgccggtaatcaaaccgcttaagtgacgtaaaagggtggatttgccggaacccgacggcccaagcagagccaccatttcaccgtgatgaatgttcagatcaaccgcatgcagcgcctgatgctgattgaaggttttggcgagcttctcgacacggataatcgtttgcatgatgcagcctccctaaaaaagtggctccatcgtggcggattattgtgacgatttggttaattaaaagtgactaacagatgaagagttaacgggaattcgatgacagtgcgggagggcgggcctcccggcgggttattgcgttggttgttgtttgacgacattaatcatccacggtacgccaaatttatcggtgactttgccaaagccatgcgcctagaaagtttcctgccaggccatttcgatttttccgttagcggcaagattgtcaaaccagcgttttccttcttcgacctgttgcgaatcgagcaccagcgtaaagccggagtagctggcttttcctgacggcatggcatcgctcatcatgatgtcgcttccggcaatgcgcacattggcgtgggcgatggcggtatcgggaaattgcattccggaagggcagttctcggcgctgtcctgcgctgattttggcatttcgccgaagctgattttatagagcagttcagcgcccaacgtacgttgataataagcaattgcgtcggcacagttaccggcaaaagagaggtagggacttaacggcatgatggtgacctcagttaagagaagccaattaagtgtagttcgaaatttatacagatgagaggctgcctgataagacgcgcaagcgtcgcatcaggcagtcggcatcgttgccggatgcggcgcgagcgccttatccggcttaccgatcacaatacaatcagttctttttcacaaactcagatttcagtttcatcggaccaaaaccgtcgattttgcaatcgatgttatggtcgccttcaaccaggcggatgtttttcactttggtgccaattttcagcatcgaagagctacctttcaccttcagatctttaatgatggtaacgctgtcgccgtcagccagcagattgccgttagcatctttaacgatcagctcgtcgctttcctgtgcaggttctgcgtcgttccattcgtaggcacattccgggcagatgtacatgccgttatcttcgtaagtgtattcggagttgcattttgggcagtgtggtaatgacatgtggatttcctcaaaagtcagcagggcaaaagcgccaaaaaacggcagattgccgaaaaaggccgcaattatacacaaaatccctgagtttgtcgggggtactgctgattttagacgacgatcgttttcatttgaaaggaaacgcaaaaagaaaataatctttttgcctctatttattatttaagataatgttaatgctctacttgttcttttttttattcacatgatatttttatctttctgacgttttaaacgcatcagaagacgttatttattctgataaaaaacaacacactaaatataaaattatttcttgcagtaattataaaagccaaaaacagaactcaaaaacaatctggctaaataaaagtaacaaaatttgctttaaggaagaattttctatgtacacacagaccctgtatgagttaagtcaggaggctgaacgcctgttacagctttctcgccaacagttgcagttactggaaaaaatgcctctctctgtacccggagacgacgcgccacaactggctttaccctggagtcagcctaatatcgccgaacgtcacgcgatgctgaataatgagttgagtaaaatttcccgactggaaatggtgctggcgattgtcggtactatgaaagcagggaaatcaaccaccattaatgccattgttggtacggaggttctgcctaatcgtaatcgcccaatgactgcgctgccgacgcttattcgccatacgcccgggcaaaaggaaccggtactgcatttttcacatgtcgcgccaatcgattgtttaattcaacaattacaacagcgcctgcgtgattgcgatattaagcatctgaccgatgtgctggaaatagataaagatatgcgtgcgcttatgcagcggatcgaaaatggcgtcgctttcgaaaaatattatctgggtgcccagcctatttttcattgtctgaaaagtttgaatgatttagtgcgactggcgaaggcgctggacgtcgattttcctttttctgcttacgccgccattgagcatattcccgtgattgaagtggagtttgtccatctggcggggctggagagttatcccggtcagttgacgttactggatacccccgggccaaatgaagccgggcaaccgcatctgcaaaaaatgcttaaccagcagctggcacgcgcctcggcggtactggcggtgctggattatacgcaactgaaatcgatctccgatgaagaggtccgtgaggcgattttggcggtggggcaatcggtgccactgtatgtgctggtcaataagttcgatcaacaggatcgtaacagtgacgacgccgaccaggtgcgggcactgatttccgggacgctgatgaaaggctgtattacgccacagcagatatttccggtgtcgtcgatgtggggctacttggcaaatcgagcgcgccatgagttagccaacaacggtaagttaccagcgccagagcaacaacgctgggtggaagattttgcccatgccgcgctcggcaggcgctggcgtcatgccgatctggcggacctcgaacatattcgtcatgctgccgatcagttgtgggaagattcgctgttcgcccagccaattcaggcgttgcttcatgccgcttacgctaacgcctcgttgtatgctctgcgatctgctgcgcataaactgttgaattacgcgcagcaggcgcgggaatacctggattttcgtgcgcacgggttaaacgtcgcttgtgaacaattgcggcaaaatatccatcaggtcgaagaaagtttgcagctattgcaactcaatcaggcgcaggtgagcggcgagattaaacatgaaatcgagctggccctgacctccgccaaccactttctgcgtcaacagcaagatgcgctgaatgcgcagttagccgccttgtttcaggatgattcggagccgttaagcgagattcgtacctgctgtgagacactgttacagacggcgcagaacaccatcagtcgcgactttacgctgcgttttgccgagcttgaatccaccctttgccgggtgttaaccgatgttattcggcccattgagcaacaagtcaaaatggaattgagcgagtcagggtttcgtcctgggtttcattttcctgtttttcacggagtagttccccacgtcaacactcgccagctgttcagtgaagtcatttcgcgccaggatgcaacggacgagcagagcacgcgtttaggcgttgtgcgtgagactttttcgcgctggttgaatcagcccgactggggacggggaaatgagaaatccccgacagagacggttgattacagtgtgttgcaacgagctttaagcgcagaagtcgatctttattgccaacaaatggctaaagttctggcagagcaggtcgatgaatctgttacggcaggcatgaatactttttgcgctgagttcgcttcatgtttgacggaattacagacgcgtttacgcgaaagcctggctctgcgtcaacaaaatgaatcggtggtcaggctgatgcagcagcaattgcagcagactgtgatgactcacggctggatttacaccgacgcccagctgttacgcgatgatattcaaacacttttcacggcagaacgatattgaccaagacgttactggacggccccggtcgcgtgctggagtcggtttatccccgctttttagtggatctggcgcagggcgatgatgcccgccttccacaagcccatcagcagcagtttcgtgaacgactgatgcaggaacttctttcgcgtgtgcagcttcagacatggacgaacggcggcatgttaaatgcgccgcttagcctgcgactgacaatggtggaaaaactggcgtcgatgctggatcccggtcatctggcgctgacgcagatcgcgcagcatctggcgctgctgcaaaaaatggatcaccgccagcactctgctttcccggagctcccccagcaaattgccgccttgtatgagtggttttcagcccgttgtcgctggaaggaaaaggcgttaacgcaacgaggcctactggtgcaggcaggtgatcagagcgagcaaatttttacccgctggcgtgctggggcgtataacgcctggtcgttgcctgggcgctgttttatcgttctggaggagttgcgctggggtgcatttggcgatgcctgccgtctgggaagcccgcaagcggtggtgttgttactgggtgatttgcgcgagaaagcgacacaacatctggcagagagtatcaatgcggcaccgaccacgcgtcactattaccatcagtggtttgcctcttcgggaggggagcatgctgattttttaagttggctgggaaagtggtccacggcagataaacagcccgtttgctggtcagtgacccaacgctggcaaacagtcgcgctggggatgccacgactctgttcagcgcagcgtttggtgggggcaatggtcgaggaaatcttctctgtaaatttggcgtaaataatcagttacatcaatgagtcctaaacgaaatccatgtgtgaagttgatcacaaatttaaacactggtagggtaaaaaggtcattaactgcccaattcaggcgtcaactggtttgattgtacattccttaaccggagggtgtaagcaaacccgctacgcttgttacagagattgcatcctgcaattcccgctccccttttgcggccgtcgcgctgatttttctggcgtttgcggaaatgggccaactctgcgaggaaagctatgctgaaaaggaaaaaagtaaaaccgattacccttcgtgatgtcaccattattgatgacggtaaactgcgtaaagccattaccgcagcatcactgggtaatgcaatggaatggttcgattttggtgtttatggttttgttgcttacgcattaggtaaagtttttttcccgggggctgaccccagcgtgcagatggttgctgcacttgccactttctccgttccctttctgattcgaccgcttggcgggctcttctttggtatgttgggcgataaatatggtcgccagaagatcctcgctatcactattgtgattatgtcgatcagtacgttctgtattggcttaataccgtcctacgacacgattggtatttgggcaccgattctgctgttgatctgtaagatggcacaaggtttctcggtcggcggtgaatataccggggcgtcgatatttgttgcggaatactcccctgaccgtaaacgtggctttatgggcagctggctggacttcggttctattgccgggtttgtgctgggtgcgggcgtggtggtgttaatttcgaccattgtcggcgaagcgaacttcctcgactggggctggcgtattccgttctttattgctctgccgttagggattatcgggctttacctgcgccatgcgctggaagaaactccggcgttccagcagcatgttgataaactggaacagggcgaccgcgaaggtttgcaggatggcccgaaagtctcgtttaaagagattgccactaaatactggcgcagcctgttgacatgtattggtctggtaattgccaccaacgtgacttactacatgttgctgacctatatgccgagttatttgtcgcataacctgcattactccgaagaccacggggtgctgattattatcgccattatgatcggtatgctgtttgtccagccggtgatgggcttgctgagtgaccgttttggccgtcgtccgtttgtgctacttggtagtgttgccctgtttgtgttggcgatcccggcgtttattctgattaacagtaacgtcatcggcctgatttttgccgggttactgatgctggcggtgatccttaactgctttacgggcgttatggcttctaccttgccagcgatgttcccgacgcatatccgttacagcgcgctggcggcggcatttaatatttcggtgctggttgccggtctgacgccaacactggcggcctggctggtcgaaagctcgcagaatctgatgatgcctgcctattacctgatggtagtggcggtgattggtttaatcaccggcgtaaccatgaaagagacggcaaatcgtccgttgaaaggtgcgacaccggcggcgtcagatatacaggaagcgaaggaaattctcgtcgagcattacgataatatcgagcagaaaatcgatgatattgaccacgagattgccgatttgcaggcgaaacgtacccgcctggtgcagcaacatccgcgaattgatgaataagctgaaacggatggcctgatgtgacgctgtcttatcaggccaattgaactcttaaggttcacttaatctctgacgcgcatactctcctccaggttaacggaggagagtgcaatgaaaaaccgtgtttatgaaagtttaactaccgtgttcagtgtgctggtggtcagcagctttctttatatctggtttgctacgtactgatctttcttcagccgtacccaggcccgcgtgccggaagtctcttgccggttttgcaggaaaaactgcccgtgatgcaactgtgtaatgcggctgacaatacttaaccccagaccaatcccgccataacggctgtccatacgtacaaacgctttactcaactccccgcatttactctcatcaatacccggtccttcatcttcaacggccatgaccgctccgccatcttcttgcagcttaatcataatgttgctgccttgtgggctgtaacgatgggcgttttctaccaggtttcgcaataacatccgcagcagggttgcatcaccctgaacggtgatgtcggcggcgctctctggcaatagcagggtttgctgtcgctggtcgagcatggtactgagttcgtcatacgaggggagaatgacatcttccagcagttttacatgttgataattaccggaagaaaatgactgtccggcacgcgccagttgcagcagctgggagacgctctccatcatctgatcaagccgtgccactaacggtgctacatcaatgtgatgcgttttcgccagcagttccagatgcaaacgcacccccgccagtggcgttcgcagttcgtgcgcgacgtcagcggtaaataacctttcgttatccagcgtgctcgtcaggcgactgaccagatcgttcaacgccgaaaccaccgcttcgatttcgagggtggcgctgtgaatggcaatgggcgttaagttgtcggcggtgcgcgcttccagctctttttgcagctccgccagcgggcgggtgatgcggcgtaccgcctgatagcagataaatagcgtcaggctgaccataaagacgccggggacaatcaggctggcgaccgcctcgcggatctcacgcatgatgtggcgatcgttgttgcgattgtcgcgtagcgcctgctcaaacagctgaatctgctcggtactttcatgccatagccagaagacgctgatcagctcaaacaccaacaaaatggccccgatggtcaatatcagccgttggcgcagcgatattggtcggcgcagaaaacgcatcagattcaattagttttcctcattcgcgaccagcatatagccaaagccgcgcacggtgcggatacgggctttgcccactttgtcgcgcagattgtggatatgcacttccagggtgttggtcgagggttcattgtcccagttatagatgtcgttgtagagaatttcccgatgtaccggactgcctgctttgagcattaaccgtgacagcagagcatattctttgggcgtcagaatcaactcttcaccgcccatccatacctgacggcgacccatattcagcgtcagattgccaacaatcagctcactttcgccctgattattatggcgtcgtagcagggcgcggatacgggcgtgtaactcttccagcgcaaaaggcttcaccagatagtcatcggcaccgacatccagcccggcgattttgtcggtcagcgtatcgcgagcggtgaggatcagtaccggcagggtgtattttttctgccggatacgggcgagaaaatgcagtccatcttcgtcgggtaaccctaaatccagtaccaccaggctgtaatgaccggcctcaaggctttgttccgccatccgcgcggttgttacgccatcgcacgtgtagccttcggtttgcgccgccagaatcagtccctgcaataacagcgtatcgtcttcaacaatcagaattttcattcactcactctcctgcaagtttgcagaacatcatccgcagcctggtaatacttcgtctcaacgccagttaatcccaatagcgtggagaataaattgtcttgtgaatagtgttgcgtttgcgcctgtttttgcaggcagttctggtcaacctgataccgtttttgataatcctccgacagccacagcagcatcggcacctgtttttggctatccggggcgatggcataaggcagaccgtgcagatagatgccattttcacctaacgattcaccgtggtcagaaagataaaccaggctggtggtaaatttatcctgatgttctttcagcagattaatcgctttatcaacaatatagtcgacgtaaaccagcgtgttgtcgtaagtgttcaccagttgctctttggtacaggtctggatctcattggtgtcgcaggttggggtaaatttcctgaactgcggcggatagcggttgtaataggtcggaccgtggctgccgatggtgtgtaagacaatcacgccatcaccctgcaggttattgatgtactcttccagcccgtggaacagcacttcgtcatagcattcgccgttgatgcactgaccaggcagattcagcgcggtgacgttctggtgaggcacgcggtcgcaggcacctttacagccgccatcgttgtcattccacagcacgttgatgcccgcttgctgaatgatatccagcacgccttcctggtgctgtgccagctcttctttgtaatgctcacgcggcatatccgagaacatgcacggtactgaaactgccgttgccgtgccgcaagatgcggtattagggaaatagaccacgttatctttcgccagccgcgggttagtttcacgcgggtagccgttgagggagaagttctccgcccgcgaggtttcgccgacaatcaggatggtcaaatttttacgtttttcgttctgcattaacgggttgcggtgggcgtcttcaccaattcgcaccagcggtagatttgccagtcgctgatgggagtaccatgaccagctggcaacaatgctgttagaggggcttaaggatttcaccagctctttgttattgcggaacaacgaggcgtagtctttataaaacagtgcggcgaccagcaaaatcagcagtacagaaaccagaatattggctccacggaaaagaacactgcgcagacgcgaggtggcaggtttgatttttagccagcaggcaatcagcgcagcaagcacgccgctgaatcccagcgttaataacatttgcggtgtcatcagcgcataactttctgctggagtggtatcaataatattggcaatcatcgagcggtcgatgacgatgccgtaagtcattatgaaatattgtgcagccgcgccaaccagaataaacaggcaggccagtggtcgattaagccataagaaagagcttagtgtcaggacaatattaatcacgctgaaagcgacgaccggcatcgacaagaaaaccagtacgttatgcagcgaatccagcggcagcgcctgcaacacctgtttaaaaaaggcaatattcaggcagatagagatataaaaagcggccaacaatagccaggcgagtaaattcaaagaggggctttttagtaggcgcttcaacatcacggtgtttccatcgaacaaagtgcgcatatgctcgcaaagcaaaattaagccaaccttaagttcttaaggttggcttttatgtttgctggattaaggggaattaatctttgcttattggtgcatctaagggatacgggtttttatgtagccggttgtaattcagcgcatacatggcggtgatgaccatcagggtgacaaatgaccacataacctctttcgccccggaccccaccacggcccagatgcagtagaggaaggcaatggtagtaacagccagatatgccgggcgtgctttaccaaagtgaccgtggccgagcagcagtaacgccgcacaggtgtaaagatatggcaccagtgtaaagatgaccgacacggaagataccagaccgaactctttggttgcgtttggcgaaatgctactgagctggaagatggtcatcaaaataccgacgataatcagccccgccactggcgtacccgctttatttacacgggcaaaaatcggtgggaacagtccgtcatcggcagcggctttcgccgtttgacccgccagcaacgtccagccgcccagtgaacctaagcaacccgcagctgcgcagaaggaaacaatggccccagcggtgtcacccaacgccatccgtgcggcatcaccgaatggcgaggcagaaacgcgcagtgcggcattagggatcatccccataatcgcggtggtggagagcacatagcaaacggcggcaatcaataccccaccaatggtggcgatagggacattgcgtttcgggtttttcaccacacctgcggcaacggaggcactttccacaccgatgaacgaccacagcgtaacgttaagggtactttgaatcgcaccgaaggtgcccaggccgctgacgttccatgccgccatataggtttcaccacggaaccagaaccagccaaatacggcaatcccgacgatggggatcagcgccagcacggtggcaacggcctgcacacgggtgatcattttcggaccgacaatgttcagcaggacgaagatccacagcaccacgacgcaggtgatggttaataccaatggatctttcagaatcgggaagaagtaacttaaatatcctacgccaatgaccaccatagcgatattgccgatccagcaggccagccagtagaggacgttggtttgataaccgagaaacgggccaaagcagcggcgggcgtaagcgtaagaaccaccaggacttggatcgaggaacgacattttggcgtataccatcgagagccccagcgcaccgataatcgtcaccaaccatccataaatggcaatcccgccagtggaggccaggtttgcaggtaacagaaaaacacctgaccccataatattccccgacaccatcagggtgacggggattaagcccactttgtgagcatcagcatccgaagacataattaaactcctgcgaaggcgagcttcgtgacaataaattacgtcatatcatacgcctgcattcgatagttgaattattatcgaccgggttatcgctgatgccgttattaatatagctcttcgttaaggttaaaaatcaggcgacagttcgttctctgtgctgactaacataatgcagcggcgtcataccgtagaagtctttaaagacagaaataaagtacgacgtactgttgtagccgcaggactgtgatacctgagagatatttttaccgtccatcattaattcatttacggcataacgcatgcggcaggtggtgattatttggctataactggtgttttcgcttttcagctttttctttaacagacttgggctaagacataaacaactggctaccatactaagattccagtctttgtgaatatcgctttcaataatttgataaacgctgtcacttacacaattacgtaacatatacatcattaatgaaaggaattttttactgtcgagaaaacgggatagcaccgtgaataataatgcgcgtgttcgttccttttctgactcagtttctgcgggcatcatgctgtgttgcgcggcaacgcgaaagacgtctggcgtcaggcatggcagggtgagtatgggcgtagcgctacgttgccatactggtatttgcgagagatctttattcagaaaccggaggtaatctttgatgatgtcgtgactaatatgagcaaccaaagtgttgttaagagaggagacgtcgataatattattttcacaatttaataacgccatatggttagctttaaggctaataggttctttcccattcacccttatccagacatctttttcagtcaataaaacaatacaaggttggtcgctgcaaatcctcatacatgtactcctgagtgcgaataaaagaccagttctcgctaaagcaaagcgataccgggaaatggttatataattgtatgatgaatataaacatgcataaaaataacgagttttactaatattacaaatttttatagtaatttctcatgtacatatttttttacaggataaataacaggcaaaaaaaagcgcggggtggggccgcgcaaaaagtatgacatttttgtttgcagcaatttttatgaaaacgttgccatactcaaaaggcctaaggccaggcggcgtaatgttatttaaacaattacgccttcagcggaatagtggttacgctttcacacacataacgtggtaaataccgtcaataatttcagtcccttcagtttcgtgttcaaatccagggaaatggtggtcccaggattgcagcgagcgtaaataacttacttgcggactgtttttatcgccgaagttttcaccagacagcagcatcgggattcctggcggatatgggataactgagtttgccgcgatgcgtcctggcagattttcaatggataccagttcgacattgttgtcgacaatcgcgttgtacgcttcacgcggggtgatttccgccaccgacaggccggaataggcttcgttcaaccgtgcgccagggttgttttctttcagccaggcaaacatggtgtcacccagatcgtgaatccccatgttcgcgtaagtgtcaggatattgttcaacaagttccggcatcacctgcgccagcggtgtgttggcgtcatagtggcgtttgaaggagcaaagggtgttaaccagagttccccatttcccacgggttacgcccatagagaacaggaacataatttggaagtcagtggtgcgggtaggcacaatgccgtggcgaccaagccaggcagtgaccagcgccgccggaacaccggtttcttccagttcaccatcttcacccattcccggagcaaggatgctgactttaatcgggtcgagcatactccagttatccggaatatctttgaagccgtgccagctttcgcccggatgcattacccagcagtcctgaacggtggtcagcagtttggttggtgcgtcagcaaagtcataggttttgccggtttgtgggtcggtgacgacttctttgttccacggtttgaagaaccagctaccgtcagcggtgaactctttatacagccgcgccatcgcctgacggaaatcaaccgcttcgtcgatcacttcctgcgtcagtgacaggccgctgttgccgtccatcatcgacaccgccacgtcgttggatgcgcagatggcatacagcggggaggtggtggcatgcatcatgtaggcctggttgaagcgggagaagttaatcgccccacgaccttcacgtacatgaatataagaagcctgtgaaagcgcattcagcagtttgtgggtggagtgggtggcgaaaacggtaggaccgttgtgatcgccaggttcgccgcgcatggcatagtgatcggcatagatcgggttgaaacgtgcatagccgtaccaggcttcgtcaaagtgcagacgatcggaggttttttccagcagatcctgcgcttctttagcgttataacacacgccgtcataggtgcagttggtcaccacgcagtaagacggtttttgcccggctttgtctttagtcagcgggctttcactgattttcttctgcaaggtttcaggttgcatttcctgcggatagattggcccgataatgccgtagcggttgcggcttggcaccatgtagaccggtttcgcgcctgtcagcatcaagccttgttcgatggatttatggcagttacggtcaacgaccacgacatcgttatcggtcatgcaagcctgcatgatggtgcggttagagccggaagtaccgacgactaccgaccaggagcgatcggcaccaaatacgcgtgcggcatatttttcgctttcgccaaatgcgccagtatggtcaagcaaagaaccgagggaagttcgttcgatgcccatatcggtgcggaacagattttcaccatagtagtcatggtagaaacgtccggcgggtgttttggtaaaaccaacgccgccctggtggcctggcgctgcccaggaatattcatggatgtcgctatatttcatcagcgcgctgaacagtggcggcaacagctgctggcggtagcgggtcatcgcggcaacagcgcgtccggcgataaagtcggcggtatcttccagaatccaggcgaattcatcgacaagctccagcaggtcgcgatccattgcggcgagggctttttcccgatcgcccaacaggaagaccggcacgttttgttggcgctcatgaagcttaccgatcaattgtctgacgttttgatgttcgtccggatgttccatttgatagctgaacatcaggcagtcaatggcttcgtttgaagagagaatggcaaaaccatcatcaaaggaggtggatttaatcacggtaacattttgctggcttaaagcatctgccagacgctcaacggcgttaccgacccaggtgtcttgatggagaaactcgctttcaacaattaatactttcatcattgcttacccggttatgaaggaatcttcgttgcgggcaagtatcttccggccttttcgggctgtaaagcgcgtgaaaaacaaacatttttgaaatatttatttttataaacaatgcgttatgtgattattttaaattattttcactgcttattatcgacggctaaactatttttttggctgatactgatatcgtctttagccgggaaacgtctggcggcgctgttggctaagtttgcggtattgttgcggcgacatgccgacatatttgccgaacgtgctgtaaaaacgactacttgaacgaaagcctgccgtcagggcaatatcgagaatacttttatcggtatcgctcagtaacgcgcgaacgtggttgatgcgcatcgcggtaatgtactgtttcatcgtcaattgcatgacccgctggaatatccccattgcatagttggcgttaagtttgacgtgctcagccacatcgttgatggtcagcgcctgatcatagttttcggcaataaagcccagcatctggctaacataaaattgcgcatggcgcgagacgctgtttttgtgtgtgcgcgaggttttattgaccagaatcggttcccagccagagaggctaaatcgcttgagcatcaggccaatttcatcaatggcgagctggcgaatttgctcgttcggactgtttaattcctgctgccagcggcgcacttcaaacgggctaagttgctgtgtggccagtgatttgatcaccatgccgtgagtgacgtggttaatcaggtctttatccagcggccaggagagaaacagatgcatcggcagattaaaaatcgccatgctctgacaggttccggtatctgttagttggtgcggtgtacaggcccagaacagcgtgatattaccctgattgatattcactttttcattgttgatcaggtattccacatcgccatcgaaaggcacattcacttcgacttgaccatgccagtggctggtgggcatgatatgcggtgcgcgaaactcaatctccatccgctggtattccgaatacagcgacagcgggctgcgggtctgtttttcgtcgctgctgcacataaacgtatctgtattcatggatggctctctttcctggaatatcagaattatggcaggagtgagggaggatgactgcgagtgggagcacggttttcaccctcttcccagagaggcgaggggagcgtccgagcatcatgaggccgaaaactctgcttttcaggtaacttattaccataaactcagatttactgctgcttcacgcaggatctgagtttatgggaatgctcaacctggaagccggaggttttctgcagattcgcctgccatgatgaagttattcaagcaagccaggagatctgcatgatgactgcacccaaaattacatttatcggcgctggttcgacgattttcgttaaaaatattcttggtgatgtgttccatcgcgaggcgctgaaaacggcgcatattgccctgatggacattgatcccacccgcctggaagagtcgcatattgtggtgcgtaagctgatggattcagcaggggccagcggcaaaatcacctgccacacccaacagaaagaagccttacaggatgccgattttgtcgtggtggcatttcagattggcggttatgaaccttgcacggtgactgatttcgaggtctgtaagcggcatggtctggaacaaaccattgccgatacgttggggccgggcggtattatgcgcgcgctacgtaccattccgcatctgtggcaaatttgcgaggacatgacggaagtctgccccgatgccaccatgctcaactacgttaacccaatggcgatgaatacctgggcgatgtatgcccgctatccgcatatcaaacaggtagggctgtgccattcggtgcagggaacggcggaagagctggcgcgtgacctcaatatcgatccgtccacgctgcgttaccgttgcgctggtatcaaccatatggcgttttacctggaactggagcgtaaaaccgccgacggcagttacgtgaatctctacccggaactgctggcggcttatgaagcagggcaggcaccgaagccaaatattcatggtaatactcgctgccagaatattgtgcgctacgaaatgttcaaaaagctgggctacttcgttacggaatcgtcagaacattttgctgaatacacgccgtggtttattaagccaggtcgtgaggatttgattgagcgttataaagtaccgctggatgagtacccgaaacgctgcgtcgagcagctggcgaactggcataaagagctggaggagtataaaaacgcctcccggattgatattaaaccgtcacgagaatatgccagcacaatcatgaacgctatctggactggcgagccgagtgtgatttacggcaacgtccgtaacgatggtttgattgataacctgccacaaggatgttgcgtggaagtagcctgtctggttgatgctaatggcattcagccgactaaagtcggtacgctaccttcgcatctggccgccctgatgcaaaccaacatcaatgtacagacgctgctgaccgaagctattcttacggaaaatcgcgaccgtgtttaccacgccgcgatgatggacccgcatactgccgccgtgctgggcattgacgaaatatatgctcttgttgacgacctgattgccgcccacggcgactggctgccaggctggttgcaccgttaaaacgcgactaaacgctactgcgccgggggatttattccggcgcacacctctgacgataccaataacagaaggcgggcgttggtaacagcgacccgataccctatgagcatttcaatgactacaaaactcagttatggatttggagcgttcgggaaggattttgcgatcggcattgtgtatatgtacctcatgtattactacaccgatgtcgttgggctgtctgtgggtttggtcggtactttgtttctggtggcgaggatctgggatgctattaacgatccgattatgggatggattgtaaatgctacgcgatcgcgatggggtaagttcaaaccctggatcctgatcggtacgttggcaaactctgtaatcttatttctcctctttagtgcgcatctgtttgaaggtactactcagattgtctttgtttgcgtgacctacatcctctggggcatgacttacaccattatggatattcccttctggtcgctggttccaaccatcacgctcgataaacgtgagcgtgaacaactggttccttatccgcgtttttttgccagtctggcgggctttgttacggcaggtgtgacgctaccatttgttaattatgtcggcggtggcgatcggggatttggctttcagatgttcacactggtactgatcgccttttttattgtttcaaccatcatcactctgcgcaatgtgcatgaagtcttttcgtcagacaatcaaccgtctgctgaaggaagccatctgacacttaaagccatcgttgcgctaatttataaaaacgatcagctttcatgcctcttgggtatggctcttgcttataatgtagccagcaacattattaccggatttgctatctattatttctcatatgttatcggtgatgcggatttgttcccctattatctgtcgtatgcgggagctgctaacctggtgacgttagtatttagactggccccctgaatctccagacaaccagtatcacttaaataagtgatagtcttaatactagtttttagactagtcattggagtacagatgattgatgtcttagggccggagaaacgcagacggcgtaccacacaggaaaagatcgcaattgttcagcagagctttgaaccggggatgacggtctccctcgttgcccggcaacatggtgtagcagccagccagttatttctctggcgtaagcaataccaggaaggaagtcttactgctgtggccgccggagaacaggttgttcctgcctctgaacttgctgccgccatgaagcagattaaagaactccagcgcctgctcggcaagaaaacgatggaaaatgaactcctcaaagaagccgttgaatatggacgggcaaaaaagtggatagcgcacgcgcccttattgcccggggatggggagtaagcttagtcagccgttgtctccgggtgtcgcgtgcgcagttgcacgtcattctcagacgaaccgatgactggatggatggccgccgcagtcgtcacactgatgatacggatgtgcttctccgtatacaccatgttatcggagagctgcccacgtatggttatcgtcgggtatgggcgctgcttcgcagacaggcagaacttgatggtatgcctgcgatcaatgccaaacgtgtttaccggatcatgcgccagaatgcgctgttgcttgagcgaaaacctgctgtaccgccatcgaaacgggcacatacaggcagagtggccgtgaaagaaagcaatcagcgatggtgctctgacgggttcgagttctgctgtgataacggagagagactgcgtgtcacgttcgcgctggactgctgtgatcgtgaggcactgcactgggcggtgactaccggcggcttcaacagtgaaacagtacaggacgtcatgctgggagcggtggaacgccgcttcggcaacgatcttccgtcgtctccagtggagtggctgacggataatggtttatgctaccgggctaatgaaacacgccagttcgcccggatgttgggacttgaaccgaagaacacggcggtgcggagtccggagagtaacggaatagcagagagcttcgtgaaaacgataaagcgtgactacatcagtatcatgcccaaaccagacgggttaacggcagcaaagaaccttgcagaggcgttcgagcattataacgaatggcatccgcatagtgcgctgggttatcgctcgccacgggaatatctgcggcagcgggcttgtaatgggttaagtgataacagatgtctggaaatataggggcaaatccagtattcttcccacgcttagttaaatcattatcccgacgcattttatgggccggagcatctattcttccggtgttaagctgtggtgttctcctgttaatggcattaatgagctatcacaacgtcgtcctcattgtgattgcgggtattttgctgaatgtgggaacggcgcttttctgggtattacaggtcatcatggtggcagataccgttgattacggtgaatataaactgcacgtacgctgtgaaagtatcgcttactccgtgcagactatggtggtgaagggcggttcagcctttgcggcttttttcattgcggttgtgttagggatgattggctatgtaccgaatgttgaacagtctacgcaagccctattaggtatgcagtttattatgattgctctaccaactctgtttttcatggtaacgctgattctctacttccgtttctatcgcctcaatggcgacacgctgcgcaggatccagattcatctgctggataaatatcgcaaagtaccgcccgagcctgttcatgctgatattccggtcggtgcagtgagtgatgtgaaagcctgacgtggacaatagctaacgaaaatggcctgatgcgatatgtttatcaggccacgtcttaatgtaatgctttggatttgcaaattttgtagaccggataaggaattcacgccgcatccggcatcaacaaagcgcacgttgttatccggttatcaagccaaagcgggtgatgctgccaacttactgatttagtgtatgatggtgtttttgaggtgctccagtggcttctgtttctatcagctgtcccttctgttcagctactgacggggtggtgcgtaacggcaaaagcactgccggacatcagcgctatctctgctctcactgccgtaaaacatggcaactgcagttcacttacaccgcttctcaacccggtacgcaccagaaaatcattgatatggccatgaatggcgttggatgccgggcaactgcacgcattatgggcgttggcctcaacacgattttacgtcacttaaaaaactcaggccgcagtcggtaacctcgcgcatacagccgggcagtgacgtcatcgtctgcgcggaaatggacgaacagtggggctatgtcggggctaaatcgcgccagcgctggctgttttacgcgtatgacagtctccggaagacggttgttgcgcacgtattcggtgaacgcactatggcgacgctggggcgtcttatgagcctgctgtcaccctttgacgtggtgatatggatgacggatggctggccgctgtatgaatcccgcctgaagggaaagctgcacgtaatcagcaagcgatatacgcagcgaattgagcggcataacctgaatctgaggcagcacctggcacggctgggacggaagtcgctgtcgttctcaaaatcggtggagctgcatgacaaagtcatcgggcattatctgaacataaaacactatcaataagttggagtcattaccgccaaagcgccgtagctggcggcaatgaaagcgagcgaggaatatcaccgtcgttaatgcgccaagcagcgcgcagaacatatcggattgcgtgtcccactggtcgccctgggtgccgagaaaatcatccgctccctggcccattgccagcgccgcccaccactcgattaattcatacatcgcgcttatcgccagcgccacgcagcagactaggaacgccaccattttacgtccgcgcacgtacatcccgcgcacgagaatttctcgtgccaccagtgcaggcaccagcccctggaaaaaatgccccagcttgtcatacggattacggctcaaccccagccattcctgcacctcaaaaccgatggggactttcgcgtaggtgtattgcccgccgaccatcaggatgatggcgtgaaagaaaatgagcgtatagagcagcggcgttaacggataacgtttagcggtggcaagcagtagcggcacgacaataatcaccggtgtcacttccatcagccaggtgagtttgtcatgggccgaaatgccggtataaatcaggattaacgttagcgccagtgcgccggtgttaagaattaacggtttgagtgtgcgggtcatggtgagttcgcaagtcagggaaaatactgactattcaccagcaagcatgaaattacaatcgcaaaagaggtggcccagggggatcacctggcagcatgctgccaggcgctgggccgaagaggttacttagtgcagttcgcgcactgtttgttgacgatttgctggaagaagtcgttacctttgtcatcgaccaggataaacgccgggaaatcttctacttcgattttccagatagcttccatacccagctccggataagcgacgcattccagatgcttgatgctctgctgcgccagtaccgccgccggaccgccgatgctaccgaggtagaagccgccgtgtttatgacacgcgtcggtaacctgctggctgcggttgcctttcgccagcatgatcatgctgccgccgtgggattgcagcagatccacataggagtccatacgacctgcggtggttgggccaagtgaacctgatggataaccggcaggggttttcgccggacccgcgtagtagatcgggtgatctttgatgtactgcggaagttctttaccggcgtcaatcagctctttcagcttggcgtgtgcaatatctcgacccacaataatggtgccagtgagcgacaaacgagtggaaaccggatattgcgaaagctgggcgaggatctctttcatcgggcggttaaggtcgaccttcaccgcttcgccttcaccggcctgacgcagttcttgtggaatgtactgacctggattgtgttccagtttttcgatccagataccttcgcggttgattttcgctttaatgttacggtcagcggagcaggagacgcccatgcctaccgggcaggatgcgccgtgacgtggcagacggataacgcgaatgtcgtgcgcgaagtatttaccgccaaactgcgcgccaagaccgagtttctgggcctcttccagcagttcctgttccagctggacatcgcggaacgcctgaccatgttcgttcccttccgtcggcagttcatcgtaatagtgagcgcttgctaatttgacggttttcaggttggtttccgcagacgtaccgccaatcacaaacgcgatatggtacggcgggcaggctgcagtaccgagggtacgcattttctcgacgaggaagtttttcagtttgccgggagtcagcagggctttggtttcctggtagagatacgttttgttggcagagccgccgcctttcgcaacgcaaaggaatttgtactcatcgccatctaccgcgtacaggtcgatttgcgcaggcaggttagtgccggtgttgacctctttgtacatgtccagcgccgcgttttgcgagtagcgcaggttatcttcgatataggtgttatagacgcctttcgacagcgcttcttcatcaccgccaccggtccacacgcgctggccttttttaccgacgatgatcgcggtgccggtatcctggcaggtcggcagcacgcctttggcggcgatttcggagtttcttaagaattgcagtgccacgtacttgtcgttttcgctggcttctggatcgtgaagaatagccgcaacctgtttctggtgtgccggacggagcatgaaagaagcgtcgtgaaaggcttgctgcgccagcagggtcagggcttctggttccactttcaggatggtttcgccgtcgaagtcggcaacgctaacgtaatcggaagtgagtagatagtattcggtattgtctttccccatcgggaaaggtgcctggtagataaagggtttgtttgacatagcttccagcctgtaactctgtatttgttattcgaaaatggcgtgccgcgtagtcacgggcggcacgcaaagtgcatttataagaacccgtacatcgcggcgaagatccagccgaagacgcacgatacgctcacaccaatcaaccccggcagaataaagctgtggttgatgacgaagcgaccgatgtgggtggtgccggaacggtcaaactgaatcgctgccagatcgctcggataagtcggcaggatgtaataaccgtagcaagccggtgctgaagccacgatgtatgccggatcaacgccgatcgccagcgcgaccggaacaatcgccgccagcgccgcagcctgagagtttacaaacttggaaaccagcagcagaacaatggcataggcccacggatactctttcaccatttcacccagtacgccctgaatttcagacatatgcgcaccgaacatggtttctgccatccatgcgataccgtacaccgccacgatggcgatcataccggaacggaagacttcgttttttgagatagacgcgggattggttttggtcaggataataatcagcgccccggtcagcagcataaacatctgaataaccagtaccatcgacagcggtttgccgccgaaggatggacgcaggtccgaatcagcaccaagaagggcgactacagcgattgccccgaggaaaatccacattgccagccagttgcttttcggcagttttttgtccagcagcgtcgcggtatcaccgtaaacatactcacggttttccggtacggagatgaatttctggaactcttcgtctttatccagatctttaccacggaaccagctgaagataccgatcgccaggataccgattaacgtcgatggaatggtgattgccagcaggtcgaggaactcaagatggcgaccatcaaaggtgacattacccagcattgcaaccagagacacgaccgcaaccgacaccggactggcgatgatccccatctgtgcaccgatagaacttgccgccatcggacgttccggacggatgttgttcttaatggcgacgtcgtagatgatcggcagaatggtgtaaaccacatgacccgtaccgcaaagaatggtcagcgtacaggtcacaaacggcgcgacaattgagacatatttcgggttgcggcgcagcagcttctcggcaatttgcagcatgacatcaagaccgcccgaagcttgcaaggtcgccgatgccgccaccaccgcaatgataaccagcatgacatcaaccggtggtttacctggctgaaggtggaagacgaagaccagaatgaccagaccgataccgcctaataaacccagcgcgataccaccctttctggcaccataaaacagacatatcagtattatgataagttggatagtaaataacatgtgtgaaccctcgcgataatcctatttaaatttttgctgaatagatcacagtcacgttctgttttgtatgaactgttttcagagcctgactaaatatccgtttggtcgttaccggctttagcaaatacctcacagtgaatattggctgattaaagcagcggcaaatttatgcactgtgataagcggctttttcagagagaaagactctctggcgatgggtttatagtttgtactgcgcagatgttaatgttttgtttgctgttatcttattgatatttatcggtctattttttgttctcagggcagatgtcattaggtttatagattaatctgatctacccatttgtgggtaaaaatacacataatgcgggtgacataatagttaattaacttttgttagcgttttgaaattaaaaacaccgttcacctgaagagatattaatttttagcgatgatgcagggataattatatttgatctggcacaagttttactgatgaaggatgtaacttgtgccaggggtattttgcattacggtaataattattacttacagataaccagcgatccgttattggcaatattgtttcagtagtgagtagtgttctgcctgaatacggtaacggtaaactggacgccccgtgacgccataatggatactggtgaacaagatgtggcagttgaccagccagatgaggtatttacggcaggaaacacgcgaaatgttaacctcgttggctagctcgtcggttgaaaattcatagtcctgatgcgcgtcaatccactggcacagtgtgcgtaacgtctgcggcgttaagccttttggcaagcgacgaggatcctgttcgttggagctgctgccgtggattagctgatcaagctcggcctggtcataatactgatgtttttccagcgccattttcttttgccgccagtcggtgagcgcctcttcaaagcgggaagcctggaagggtttgatcaggtaatccacgacaccgtaatgcagcgaatctttaatggttgccgcatcggctgcggaggagatgacaatcacatcacttttgcaacgcgcgttatgcaggacaggcagtaaatcgagcccgttctctttttgcatatagatatcgagcaatatcaggtcgataggcgtatcgctattgaagataatctctttggctttctccagcgtcgaggctgttccacagcattgaaagcctgggatttgtgctacgtatcggcgattcagctccgcgaccattgcgtcgtcatcgataattaatacattgatcatctgttcgacctctccccgtcccagggtatctggacaaaaaattgtgtgaaaatcccgggttccgattccacggcgatgctgccgccgagattttctacctgttgtttgacaagtgctaaaccgacgcctcgctcgcttccttttgtcgagacacctttgtcaaaaatgtgatcgattttgtcgggtgcgatccccggtccatcatcgttaacttcgcagtgcagccagccgtgacggtagtgcaatgttacgctaatttcgccaccgggttccggccctaatgcttccagcgcgttttctatcagatttcccaatgtggtaatcagcgtcgcgacctggtcctcactgccgctgtctggcagctggctttcactgtttaaaatcagcgtatggcctaaatcggtcgcgcgattaatcttgctgattaaaaaaccagcgataaccggagatttgatcttacccagcagagagccaatctcttcctgatagttattggctgtttttagaatgtaatcttccaactgcttataactcttcagatgcaataatccgagaatcacgtgcaatttattcataaattcgtgggatcgttcacgaagtgcgtcggcatagttgaccagaccgtcgagtcgctgcatcagtttacgtacttcggttttgtccctgaaggttgaaatggcaccgatgataacgccattactgcgcaccggaacggtgttgatcagtaatagccggtctttaatcgtaatctcttcgtcgcggcgcggcgtaccgtcgcgtaacacttccgagacatctaccacctgtgaccatgagtggctgagcgtcgacagtttctcatcgtcctgcgacttacggtaattcagcaattcttgtgcggcatcgttgatcagcgtgacctcgccgcgatcgtccacggcaacgacgccttctttgatagactgcaacatggcctggcgttgctcaaacagcgtggagatttcgtagggttccaggccgaaaaggatttttttcagtaccttaaccagaatgcaggtgccaatcagtccgaccagcatgccaaataataccgaccagataatgctccagcgactgtcattgatttgttgggtcacgcggcttaactcaaggccgatcgccaccacgccaatttgtttatgattttcatcgtagatgggggtaaatacgcgtaaagcctgcgccagaaaaccgcgattgatagcgacattttctttgccattcagcgctttaaggatgtcatcacctttaaatggctgaccaatacgctgggcttcaggatgcgagtagcgaagactttgcatatcggtaacgacaataaacagcagatcgttgcgtttgcgcacggcttccgcgatggcctggatgccgctctcctgcggttttttctgcaagccctgacggatttccggcgagttggcgagggtacgcgccactgccagtgccttgttggctagcccgtctcgcgtcatatcactgatttgcgagaagtaaatcagatgcaccaccaatagcaccgagaacagtaccgcactgaccattaagatcactgtggtactcaatttcatcggacgtttgcgtaacatgcggtagggcaatgaatgtctcatcagcttccttgtgtgacaaatttcttaaacattatctctgatgaggcgggtaattcaaagggagtaagaatgattggctatataggggaagagattctggcaacggaaactgccagtgctgtatgaagattccagggctatgcttatagcgataatcatactgatgagagagggaaagtcatggatcaggcgctactggacgagggttatcgctgttataccggcgaaaagatcgatgtctatttcaacactgcgatatgtcagcattctggcaattgcgtacgtggcaacggcaagttatttaatctcaaacgaaagccgtggatcatgccggatgaagtcgacgtcgccactgtggttaaagtgattgatacgtgcccgagcggcgcgctgaaataccgtcataaataagcgagggtaaaatggaaatacgcgaaggccacaataaattttacattaatgacgaacaaggcaagcaaatcgctgaaattgtctttgtgccgactggagagaatttagcgattatcgaacataccgatgtcgatgaaagcctgaaagggcaggggattggtaaacagctggttgcaaaagtcgtggaaaaaatgcgtcgggaaaaacgaaaaattatcccactatgcccatttgcgaaacacgaatttgataaaacgcgggagtatgatgatattcgcagttgatgggagagtacagagtcacgatatttttcatgctctccgcggagtgatgcaggagagcatctgaagggtagggggatgcacaaagaatgggcagagagcgcgtttttttgtcccaagtcatcccctttactgagcaaaaaaaagaatatctcctatatgagaatcatcaatcggggttatcaagttttgcgtccccagagcattcaatattgataggagtcatattatggaaggtaaaaacaagttcaatacttatgttgtttcttttgattatccatcatcttattcctcagtgttcttaaggttaagatcattgatgtatgatatgaatttctcttctatcgtggctgatgaatatgggataccacgacaattgaatgaaaattccttcgcaataacgacatcgttagccgcaagtgaaatcgaagatttaatcaggcttaaatgcttagacttaccggatattgattttgacctcaacattatgacagttgatgactatttccgtcagttttacaagtagccaggaaggataagaagaacataaaaaatggcactattctctaaaatattaattttttatgtgattggtgtgaacatatcctttgtcattatctggtttatctcacatgagaaaacacatattcgtttacttagtgcattcctggtcggaataacctggccaatgagtctgcctgtggcattacttttttctctcttttaggagctgtagttgagtggacccgctggttatcgtgaaacgaagcgtctctcctcaaaactggatttgcggaacgacgaacgaagcagtcgcctgactgcttcgttcattaaagtgaaatttatttctgtgggcgcatcgccgggaagagaataacgtcgcgaatagtatgactgtttgtaaacagcataatcattcggtcgataccaatacccagatcagcggttggcggcagaccatattccagcgcagttacgtaatcttcgtcatagaacatggcttcgtcgtcacctgcagctttagcgttaacctgttcctggaaacgttcagcctgatcttctgcgtcgtttaattcgctaaaaccattaccgatttcacgaccaccgatgaagaattcaaaacggtcggtgatttccgggttaacatcattacggcgcgccagcggtgacacttctgccggatattccgtaataaaggttggctgaatcagatgtgcttctgccacttcatcaaagatctccgtgataatacgtcccagcccccagcttttctctaccgtaattccgatagattcagctaatgctttagcagcatcaaaattatccaggtcggccatatcggtttctggacgatattttttgattgcttcgcgcatggtgagtttttcaaacggtttgccgaaatcaaacacatgctcgccataagtgactttagtggtacccagaacctcttgtgccagggtgcggaacagtgactctgtcagttcaatcaaatcgtggtaatccgcatacgccatgtagagttccatcattgtgaactcaggattatggcgaacagaaataccttcattacggaagttacggttgatttcgaatacccgttcaaaaccgcctacaaccagacgtttcagatacagctccggcgcgatacgcagatacatatctaaatccagagcattatgatgggtaataaacgggcgagcagatgccccacctggaattacctgcatcatcggggtttctacttccataaagccgcgcgcgaccatgaactgacggatagcggccagaatttttgaacggacaacaaacgtttgacgggatttatcgttagcgatgaggtccagataacgttgacgataacggacttcctgatcctgcagaccatggaatttatctggtaaaggacgtagtgctttagtcagcaggcgcaactcagtacagtgaatggaaagctcacccgtttgcgtcttaaacagcgtaccgcgggcaccgataatgtcacccagatcccattttttaaactgatcgttataaacaccttctggcaggctatctcttgcaacgtacagttgaatacggccaccgacatcctgcaacgttacaaaggaggctttccccatgatacgacgggtcatcattcggccagcaaccgagacttcaatgtttaaggattccagttcctggttattcttcgcatcaaactcttcgtgcaactggtcagaggtatggtcgcggcgaaaatcattgggaaacgccacaccttgctgacgtagtgccgccagtttttcgcggcgatttctcagttcatcgttaaaatcaatagcctcattggctccccgtgtttcttgttcagacattttggttcctctaaatccagctttcaatttagcgtagataaagagacagatcggtacactgtattatctgcctcgactattaataactcagtttatcttatcgaaactaacgcttacctcaagttgatatcactaataaataaccatcaaaatggtttaaatgacttattaatctcgatttactagtgtgattaactgaaagttaatttattcataaccaattgtttttacgacagttaatcgttgctctcctgtatcatattcgtcggcgtgctaaacagaaaacgggtagcaaaggccaatacgacgatgatcgcgacacaagccaacgtccactctcccatctgagaaaagaatcgctggtaagctgcaattaccataccgctaatttgcgactctgtcgtctgctgtgccacgacgcctgccagccagttggcgaccgcgcctgttgccagcatataaataccggttaatacgccagacattttcagacgcgtgatttgcgcaatcgccaccgggtcaataaagagttctgcaaagcccattagcgccaacccggatatcatcacgcccattgacgcttgaccgtcagccgctgcatgtcgggcatcaaatgccaacaacataaagccacaagccatcagcagtaagccaaaggcaaacttcagccagacgcgcaatgttgagttgccgcggctttctggcgacgccagccaggccagtacaaccccagcgagcatcactgcaattgcattcaccgactggaatagtgctgtaggtacttcaatattgaatgcctgacgattcacaaagcgatcgataaacaagctgatggtactgccgccctgttgtgccagtacccagaacaacgtcccgacaaacatcaacaatacaatttgccaaagagcacggcggtgttcggggaatttgatcatcatgcgggcaatgatttgtgcggcaatgaggcaaacgatcgccagcaaatatccggaccagtcgttctccagcagcagggtaaaaaatactggggctaaacagagcatcaccactaaccagctccatactggtaaggcaaatttgacgctagtgagcgcttttttatccatactacgcgtggactggaaatgacgatgaccgcttaagaaaatcaacaaaccgataaacatgccgccacccgcaagggcaaagccaacatgccatccataccactgagcagccaggccgcaggcgattggggcggcgatagaaccgatattgcccgcagcatacagcagcgaaaaaccgccatcacgtcgatgatcgttctcgtcgtagagctcgccaagcaaacagctgatgtttgatttgaataaaccgtagccacaaataatgattgccagcgccagatacaggctaaaggttgaatttgtatcaatgcccagcaccacatggccaagggtcattaacagcgcgccggcaatcactgcagtgcggttgccgagcaggcggtcggcaagccagccgccgagaataggggtaacgtaaaccagagaagcatatgcgctgaacaggctgatggcatggttatcatcaaaaccaagctgatgggtgagatagagaatgagtaaggcacgcatgccgtaaaaactgaagtactcccagatttggatcgccacgatatagtatatcgcgcgcggctgtgagggtgttttcatgtgttctccttatgagcaaaaaagggaagtggcaagccacttcccttgtacgagctaattattttttgctttcttctttcaataccttaacggtatagcggccatcagcctgacggtatgcaccgtgaatatcggtttcaaatcccggatagtgagcgccgatttcacacagcatctgcaggaactccagaaccggacggctttcttcggtgatcatttcacccggcattaccagaggaactcccggcggatacggaaggatcatattggcgttaatacgacctaccatttcgtcgaggtaaacttcttcggtcatactgaggtgtactggcaatagcggacactaccatttgttctttttttaagcagccatctgatgatatttttccctgaaggctgccggggagatattccccagacgagagtgacgacgctgacgattgtagaaaatctcaatgtattcccgtattactgagatggcttcatcccggttattaaaacgatagtggctcaggctctcatttttcagcgttccccagaagctttccatcggagcgttgtcgtaacagttacctttacgcgacattgatgttttcagaccagactgctcctgtatgacccggtaatcgtatgcgcagtactgtgaacctcgatcagagtggtggattagcccggcaggtgggcgctggctcctgagcgccataaacagggctttacctgtcagctcttttgtcatgcgctctcccatggcgtagccgacaatttcgcacgtataaacatctttgatgccagcgaggtacaaccatccctcctgtgtggcaacatacgtcaggtccgccacccagacctgatttggtgctgtaggagtgaacgtctggttcagcagatttggcgcaactggcagattgtggttcgagttcgtagtcgctctgaacttgcgtttctgcttacagcgtagccttagctccttacgaagacgtgccagtcggtcacgaccaacgatgatgccattctctgccagctccgtctggagccgccgggttccatatgtttcgcgagtgcggatatgtgccaccttaatctccagttttagccgctcatcactttgttttctgtctgagggttcatgctgtacccagttgtaataaccgctcctggatacaccaaatacctgacacatcgcttcaatgggaaattgttgtcgccattgttcgattaacgcgtatttttcagcgactcctgtgcaaaatacgctgttgctttttttaatatatctcgctcaaggcgagcttcatttaacgccttacgcagttgcagaatttcagattccagttcagccaccgtgcgggaaccaggagtaccgagcccttttctggcggcggtaacccattgtcctaaagtgccttcaggaagagataatcgggaagcgccttcactgatcgaaagttgattttcaagaaccgttctgacagcttcggctttgaactctttagagtaacgttgggtttttctgctcattattagctccttctgatgccattctatttcaggaaggagtgtccgttaaactcaggctacctcataccgtgcagctctttctggaacgcagcatacggagtcattaccatagtcggcagcacttcaaatgcgcgatacatcagatccggcagattgtggtgaacaatcagtttgtggatattctgagccagttcctgaatacgcatgttttcatagaattcaggatcttcacgatacagagacggcagcatgtttttcacacgcaggttcaggtcgaacgcacgtttgaagtcagtcagagcacgcagcaggctcagtgctttggtcttatcgataccgatgctgaacaggaacagcaggttatacggaccggttttctcaacaacgatgccatgttcgtcgaggtatttcgccacgatgctggccggaataccaaagttgctcatggtgccgtctttttccatccccggagtcagcagggtgactttgatcgggtcaagatacatgtgctcgttatcgatgtttttgaagccgtgccaggtgctgtcagaacgcagcggccagcattcagtcgtatcgatatgatccggctgccatacatcaaagaaccagccatcagattccgttctcagacgtttgatctctttacggaatttgatcgcacgttcaatggaaccgttgatcaaacgtttacctgcattgcctttcatcatcgccgcagcggtttcagtggacgccacgataccgtagtgaggagaagtggtggtgtgcatcatgtaggcttcgttaaaggtttcttcgtttacgtcacctttaacgtggatcatggaagcctgagagaacgccgccagcagtttgtgagtggactgggtttcgtaaatcactttcccttctacacggccaccgctcataccgcatttaccttcgtaaatcggtgagaagttggttggatttgcccctatatttccagacatctgttatcacttaacccattacaagcccgctgccgcagatattcccgtggcgagcgataacccagcgcactatgcggatgccattcgttataatgctcgaacgcctctgcaaggttctttgctgccgttaacccgtctggtttgggcatgatactgatgtagtcacgctttatcgttttcacgaagctctctgctattccgttactctccggactccgcaccgccgtgttcttcggttcaagtcccaacatccgggcgaactggcgtgtttcattagcccggtagcatgaaccattatccgtcagccactccactggagacgacggaagatcgttgccgaagcggcgttccaccgctcccagcatgacgtcctgtactgtttcactgttgaagccgccggtagtcaccgcccagtgcagtgcctcacgatcacagcagtccagcgcgaacgtgacacgcagtctctctccgttatcacagcagaactcgaacccgtcagagcaccatcgctgattgctttctttcacggccactctgcctgtatgtgcccgtttcgatggcggtacagcaggttttcgctcaagcaacagcgcattctggcgcatgatccggtaaacacgtttggcattgatcgcaggcataccatcaagttctgcctgtctgcgaagcagcgcccatacccgacgataaccatacgtgggcagctctccgataacatggtgtatacggagaagcacatccgtatcatcagtgtgacgactgcggcggccatccatccagtcatcggttcgtctgagaatgacgtgcaactgcgcacgcgacacccggagacaacggctgactaagcttactccccatccccgggcaataagggcgcgtgcgctatccacttttttgcccgtccatattcaacggcttctttgaggagttcattttccatcgttttcttgccgagcaggcgctggagttctttaatctgcttcatggcggcagcaagttcagaggcaggaacaacctgttctccggcggcgacagcagtaagacttccttcctggtattgcttacgccagagaaataactggctggctgctacaccatgttgccgggcaacgagggagaccgtcatccccggttcaaagctctgctgaacaattgcgatcttttcctgtgtggtacgccgtctgcgtttctccggccctaagacatcaatcatctgtactccaatgactagtctaaaaactagtattaagactatcacttatttaagtgatactggttgtctggagattcagggggccagtctattggtgtaaggcacccacgcggagtcaaagtggatggatttcacatccagtgttttcttgatgaagtcggtgttgtacagcagaccatcataggtagagttggtaattacagcatgtaccggccaggttgcgtttggtgtttctttcacgcgcttagcaatggtagcgtgctggaattcactctgtgggataccaccaagaataccgtaagcgttacgggtcgggcggaaatagattggcgtaacatcgctcatcatcatcaggtgggtcagcgatttgtggcagttacggtcaatcagaatggtgctgcctgccggagcagagtacatgccaacaattttgttcgcagtggaagtaccgttggtcaccatgtagctgcggtctgcgttaaagacgcgagcgatatactgttctgcttctttgtgtggaccactatgatccagcagagaacccagttcagatactgaaatggaaatatcagatttcatggtattcggaccaaagaaatcatagaacaggctacctaccgggcttttctggaatgcagtaccgcccatgtgaccaggagtacagaaagtatatttaccttcacgaacatatttaaacagtgctttagtcagcggaggcagaatagtgttgatatattcgtcagtggtctgcttgatcttattagcaatatcttcagcagcacccagcgcatattcaaagaagctaatctgtaaacgcaggtcattcaggcttacatcgagagtggaatacgtattagcgaacgcgtacaacggcaggttctcgttcattttgctaatttcttcgcacagctcgagattatatttatcccagtcaaaaataacgccgcacagacgcgcattgttttcgatcagttttaataagtcgtcacggtcgttcgggtaaacaatctggaagttcagacgttcaagcgcgcgatgaagttcacggatgggttcttctttaaaataaacccccatgtgattcaatattgcaataacgttcatagtcatatctccaggtaaaaaaggcccctcccaacacatgggacaaaatgaaaggaggagcctcggaaaatacttttaattaatgtgcgttagacgcggtgtggttatccattgagtggctctggcgctcgtgcattttgcgagcgtagaacatcaggataatcaggctgacgatgaaggtacctgccagctcgaaggagcttgcgcccatcagcgcgatgaagcagaacacacaacccagtacagagcagatcaggctgacaaagttgcggatgttaacgccttcaaaacgaatcaggtcaacgcaagagtagaagtacggcagcatagtcagcagtactgcgataccggtcagttcaccgaacaggtcagatgctttaccaccggcagagttcatcagagtgatgaggatcatcagggcagtcattttcactgcagccagcagcagtaatgccgatcagttaaggatcagtttgaggtagcctgagtttaacggacactccttcctgaaatagaatggcatcagaaggagctaataatgagcagaaaaacccaacgttactctaaagagttcaaagccgaagctgtcagaacggttcttgaaaatcaactttcgatcagtgaaggcgcttcccgattatctcttcctgaaggcactttaggacaatgggttaccgccgccagaaaagggctcggtactcctggttcccgcacggtggctgaactggaatctgaaattctgcaactgcgtaaggcgttaaatgaagctcgccttgagcgagatatattaaaaaaagcaacagcgtattttgcacaggagtcgctgaaaaatacgcgttaatcgaacaatggcgacaacaatttcccattgaagcgatgtgtcaggtatttggtgtatccaggagcggttattacaactgggtacagcatgaaccctcagacagaaaacaaagtgatgagcggctaaaactggagattaaggtggcacatatccgcactcgcgaaacatatggaacccggcggctccagacggagctggcagagaatggcatcattgttggtcgtgaccgactggcacgtcttcgtaaggagctaaggctacgctgtaagcagaaacgcaagttcagagcgactacgaactcgaaccacaatctgccagttgcgccaaatctgctgaaccagacgttcgctcctacagcaccaaatcaggtctgggtggcggacctgacgtatgttgccacacaggagggatggttgtacctcgctggcatcaaagatgtttatacgtgcgaaattgtcggctacgccatgggagagcgcatgacaaaagagctgacaggtaaagccctgtttatggcgctcaggagccagcgcccacctgccgggctaatccaccactctgatcgaggttcacagtactgcgcatacgattaccgggtcatacaggagcagtctggtctgaaaacatcaatgtcgcgtaaaggtaactgttacgacaacgctccgatggaaagcttctggggaacgctgaaaaatgagagcctgagccactatcgttttaataaccgggatgaagccatctcagtaatacgggaatacattgagattttctacaatcgtcagcgtcgtcactctcgtctggggaatatctccccggcagccttcagggaaaaatatcatcagatggctgcttaaaaaaagaacaaatggtagtgtccgctattgccagtacacctcagttgaccgatccagtggctgtgtaagaatccggaaacgctcacttgtttccggatttttttatgcacattggacaggctcttgatctggtatcccgttacgattctctgcgtaacccactgacttctctgggggattacctcgaccccgaactcatctctcgttgccttgccgaatcaggtactgtaacgctacgcaagcgccgtcttcccctcgaaatgatggtctggtgtattgttggcatggcgcttgagcgtaaagaacctcttcaccagattgtgaatcgcctggacatcatgctgccgggcaatcgccccttcgttgcccccagtgccgttattcaggcccgccagcgcctgggaagtgaggctgtccgccgcgtgttcacgaaaacagcgcagctctggcataacgccacgccgcatccgcactggtgcggcctgaccctgctggccatcgatggtgtgttctggcgcacaccggatacaccagagaacgatgcagccttcccccgccagacacatgccgggaacccggcgctctacccgcaggtcaaaatggtctgccagatggaactgaccagccatctgctgacggctgcagccttcggcacgatgaagaacagcgaaaatgagcttgctgagcaacttatagaacaaaccggcgataacactctgacgttaatggataaaggttattactcactgggactgttaaatgcctggagcctggcgggagaacaccgccactggatgatacctctcagaaagggagcgcaatatgaagagctcagaaaactgggtaaaggcgatcatctggtgaagctgaaaaccagcccgcaggcacgaaaaaagtggccgggactgggaaatgaagtgacagcccgcctgctgaccgtgacgcgcaaaggaaaagtctgccatctgctgacgtcgatgacggacgccatgcgcttccccggaggagaaatggcggatctgtacagtcatcgctgggaaatcgaactgggatacagggagataaaacagacgatgcaactgagcaggctgacgctgagaagtaaaaagccggagcttgtggagcaagagctgtggggtgtcttactggcttataatctggtgagatatcagatgattaaaatggcggaacatctgaaaggttactggccgaatcaactgagtttctcagaatcatgcggaatggtgatgagaatgctgatgacattgcagggcgcttcaccgggacgtataccggagctgatgcgcgatcttgcaagtatgggacaacttgtgaaattaccgacgagaagggaaagggccttcccgagagtggtaaaggagaggccctggaaataccccacagccccgaaaaagagccagtcagttgcttaactgactggcattacagccagcagcagaccttttttcggaataccgttgctgtcgacttcaccataaactttcgggaagttaccgtcgttagcggcacgtacacctgcctggcctaccaacatcatccaggagcccagagaagtcaggcacgcaaaggcggtgaatgcagaaaccagcggcgcagcccagttaccgaggatagttgaagcactgattgcaaacggagcaccggaagccgccattacagaagacggatacataccggaaagcacctgagtcgcagcgatgtaaacaatacctgctaaaccagtacccagcatggttgccagcggaacggtacgtttcgggtttttaaccataccagtacttactgctgcggactcaacacccacgaaggcccacaggtagagcagaatacttttaatgatcgcatgaccatcagtggtatccgcagtattccagttagctgcataagttgccgcatcaaaccaatgccagccaacaatagcagtcatcaccacaggaataagaaccagcaccagaccaatagtggttaaacggcttacccaggtaccgccgagcatatttacaaaggtaaatacccagacgatagcaatacaggcgatacccgccggaacaggatcatttaatactgggaagaaggtggaaagataagatacagcggtaataccaatcgctaggttaccaatccagttagcatggtaataaagaacacctgtctgaaaaccaaatgcaggagaaatttctccggcataagcaattgggccaccttgttgcgggttttttgttgccagtcgggcatatacatacgccagcgacattgcaccaataatagagataatccaaccccagatagcaataccaccgatacttgctaggttcgcaggtaataatgcaataccgctccccatcatattaccggcaacaacaccggtacaggcaaatagcccgatcttcttggcagaactcatgctcttctcctaatttcatttttgaatttggagtccgggtcatgatgtataactatttcctgaccagaccaaactggcgataagattactcacgaaaaaaggattaatcctaaagattaggtgaaataacacaaaagtttctgtaagtgagaacttgaggttttttattaacacatcaggatcgcaagttgatatcatgaaaagataaacattcaatgtttacaatggattgcatgacattctctggttaaatttatgtaataaaaattatgcggcaaataaattgccgcaacatattataccaatgggaacatacaaaaactcaacaacaaatattccagagcataaatcaacccggagttacttattctgaagcgagaaatttgtcgagataaggtacaacataaggaacagaagtctggaaaataccattttcaatccagtaaagggtgtttgcccctgggcgtaaattaaaggcagtgagatatgcatcagctgcttcccggttcatccccttcatttcataaaccttgccaagcaacacataatttagccaggacatttcaagatcaatgccagtatttatcgcctggtaagactcatctattttaccttttaccagagcactgaccgcttttatttgatatataatggacaggttgttcaattccggcagtgtaacaatgttgtctatttctgtgttcagtgctgctaattgtttttcatctaaagggtgttgagaatggcgcacgatatcaactaatgctttttctgctctcgcgtaggtaaattctggggatgattgaacaatctcacctaataattcactggcacgattcaatgatttgtcatcgccatgcagtaaataatcatgagcctgataaaaattagttaataacgcaccacgatgaggcaaaatttgctggagcgtctcctgcattcgttgtggccacggttggtttaacgcttttgataaactctccagtaaatcattttgaatcgccagctgattaccgttagtgatgacataacgtttatccagcatggttgaaccatctgcattgtctactaattttaccgacataaagcattgttgagcacggtattggcgctgattaacaaaggcaatagataatgttttaccggaactgctcggttcatcaatgttgtagttgattttgtcatgcaccataaaggtggagaaggtgttaagtgatgtcgccaccaaatcacccacgcctatcgcgtaagagagctgatacggggaactccagctgttacaacttttatttaccatattaatgtcaatatcgcgtggattgagcaaaatacgcgatttgctcataggaagacgtgtatcaagagttgaaaacgctaccagtgctacacagatacctaacgacaacaggaaaaaaaccatacccaaaaggtagtgaatcgtttgcttttaactggggattgttcaggtggcgttgcggtgttttgaatggtaagactgtgggagggagaatttgtgtcaggaaccgcctctggtatagggggaggcgaagatagcattatttcctctccctcttcttcgctgtaccagataaccggcaccattcatttatagccgcgctttggtacagtagcgatatagacaggactatcttcatcattatcttttaatgacttacgtagttctgagatactctgcgtcacaacgtgattggtgacaatacttctcttccagacattatcgataagttcatccctgctaagtacttcgccactgtgttgagcaaagaaaaccagaagatcaattaatctcggctcaagggtaagttgacgcccattgcggctaatttggtttatggacggagtaacaagccattcgccaacgcgaactacaggttgttgcataatagaaactcattcgaaaagggaatggtgcaatgataattgccatgacctatttttaccatcaatagatgggtttatttacatgttattggtgaatgcaagacgttatttttaccagccataaacttcttgattacatagtattacgaaaggattttactgagaaccagaagtaatattccttaccatcaaaattcatcatctttgccaaagaaaaatgtgtagaaaataatccatggaaaattgtccggagcgcttactattttaatggattgttagtctttgcatgagcaagcggactgatacatttctctttgttctcattcagaaaatctcatcagtcgccgttcagaccggtgttgtgctttatggatgcgttacgctcctgatgacgtcatttgacgttcaacaacatcacggggccgcacgacatttcacgtcagtcagtgctatcgctcaggaacaaattttcccgaattgggatatacccgcaaaatgctggtgatgtggggagaatctggttgagttcggtagaattgatttggaggcagaacgcttaaatcgtggcgtcctgaaacgaaaaacggacctccgtggaggtccgtttatatgaatttggtgcccggactcggaatcgaaccaaggacacggggattttcaatcccctgctctaccgactgagctatccgggcaacggggcgcattaaaccgtaatctgcacatctcgtcaacctaatttcagtaaaagcgattcaactgcttaagattgcggcaaatcgcttcttttctgtgtttctgtcaggtcagtgcaccaccctggcggcagcgggcgaagcgcaggatatcttccgccagccgatgtgcggtgtcgacatccgcctggctacgattcaccagcattcggcttaaacagccttccagcaccagttccatctgctttgctaccatcgccggatcgtcaacttccagcgtggttaacagttcgtgggtgaaatcgtaggccgcgcttttttgctgatcggccagttgatgaatagggtggccagggtcgggataaaacgtacaggcagcgataaatagacagcccggatagcggttgtttttaacgcactccgataacgcctgataacgtgccagcagcttttgttcggcggtttgcgtttcgtcaagcatcagctgacgacgccagacatctatctgttggctaagataacgcagcgcatcgtagaggattgcctctttgtctggccagaagcggcgtagctcgtccagtggataatccacacgttcagcaaccatctccagcgtggtgttggcaatcccttgtaattctaataatttcagggcttctcccagtacatcttcacgttgcacgctattttcctccgtctttcccactgcaagtgtcgttcacggttggcgatcgcgcaaatgtgcgctgaaggtttcagcatccataaagcccgtgacgcgtgcttgtggatgctcctggccttgtccgtcaaaaaagagaattgtcggtagtccaaggacattaagatgctttaacagcgccacatcttgtgcgtcgttagcagtgacgttggcctgaagtaagaccgtgtctgctaacgctttttgcacctgcgggtcgctgaaggtgtatttctcaaactttttacaggcgacgcaccagtcggcataaagatctaacatcaccggtttgcctttggcttcaacgagcgcctgatttaactcatctaccgttttgatttgtgtaaagttgagatgcgtctgagtttgcgcggtatgcgtcgcaccaaatgcccaatcctgaagtgggcgcacgctaaccaatgccgctgccagcaggattatttgcaccacgcgcatccagccgcgtttggcctgtaggctggtgataaaggcccagccaaagaatgcgacacccagcgccgaccacaagcgtaatccccatatatcaccaatcactcgctccagcaggaagatcggcagtgcgaggatcacaaaaccaaacgcggttttgacttgttccatccacgggccgcttttcggcagcaagcggttaccaaagacggtaattagcatcagcggcaggcccatgcccaacgcatagagataaagcatgccgccgcccagccacatgttcccgctttgggcgatatacagcagaatcgcgctaagcggtgcggtggtgcatggtgaacagatcagtccggcaatcgcccccataacaaacacaccgccaggtgagccgccctgttggcgattgctcatcaatgtgagatgtgtttgcagcgaagaggggagttgtagagtaaacaagccaaacattgacatcgccagcaaggtaaagacgatggcgaggccaatgagcacgtatgggtgctgtagcgccgcctggaactgtaaccctgcggcggcaactaccagacccagcgccgtgtaagtcagtgccatcccctgcacataaataaaggtcagcaacaatgctctggcagtggagagccgctgtttaccacccagcacgatgccagaaatcagtgggtacattggcagcacgcatggcgtaaaggcgataccaataccgatcaacaacgcccagagcgcggaaaagggcaattgcgcggtgtgctgctcttgctgcggaacagacacaggctgtgacgctgcgttgttggcgaccacttcgcttaacggaacggttttggtttctggcggataacagaaaccggcatcagcacagccctggtaggtgacagttaacgtcgctcccgcactcgcctggttgatggttacgggaagcgtcagccgatcgcggtaaatctcgcttttgccgtaaaactcatcttcatgccagacgccttgcggcagctgcacgtcggcaattttcgcgtgttccggcgtaatgcggatctgtttacggtagaggtagtaaccgtctttgatctgccaggtcagattcaggtcatgttggttttgctgaaaatcaaaagcaaaggcttgatccgcggggacaaaatgtgaacgtcccggcgcgtcgaataatccggcaaaaacggaagtgctgcaaagtagcaggatcagcgtaaagatgcgttgagccatgagaggtaatctgtgtctccgtgtgtaacaggtaaaaccagaagttccggggtttgatatggatgatgagacttcaggcattccagcagtgcctgctggtgagatacggtagtttttaaaatcatctgcacttcgtattcttgctccagcttaccttcccagtaatagagagaggtagcgccggggatcaaggtcgcgcaggccgccagtttttccgccagcactttggcggctaaatcctgggctgtcgcttcatccggtgcggtacatagcaccacgacagacgcggtattcgaacttttttcatcaagcataaacacctcgcaagaacagatggaaccgcaagagagaggtcactatacaacggacgggggaaggatgttagtcggcgggaaagaaagcggggcgtgaacgccccgcgattggtcattacagcatgaagctacccagcacgaagccgaagcaaacggccagggcaacacccagagtacccgggatgaagaacggatggttgaagacgaatttaccgatacgggttgtacccgtgtcatccatctgtaccgcagcaaccagcgtcggataggtcggcagaatgaacagaccagacaccgcagcgaaagaagcaacagcggtcagcggagaaacgttcagtgccagagccatcggcatcagtgcttttgcggttgcagcctgagagtacagcagagcagaagcaaagaagaagatgacggccagcagccacggatgaccctgaatcacttcaccagcggtatctttgatccagtcgatgttgttggaaacgaaagtatcgcccagccacgcaacacccaggatacaaatacaggcgctcatacctgctttgaaggtgctggagttgaggatgttgtcggtatcgactttacagataacggtggtcagagttgcaacgctgagcatgatgatcaggattgcgttggtggtgttcatcagcggtttttcaaccagacccatgcttgggctgttgatgattgcatagataaccacgccaactacgcccagcaggaacagccagacggacgtttttgcaccggatttgatttcaatctgcttttcaccgcgcagttcaaccaggccctcttccagacgcttgcgataaatcggatcgtcagagagtttggagttgaacagcatagtgaccaggaaggacatcaccagaaccgccagcagggtggacgggatgaccacggagagcagatggaggtagctgatgccatgaccttccatcacggaagacatgtaaaccactgccgctgagattggcgatgcggtgatcgcaatctgcgcggataccactgcagtagacagcggacggcaaggtttaacgccttgttccttcgcaacttcagcgataactggcagtgtcgccagagagatgttgccagtaccagcaaagattgtcaggaaataggtcacgatcggtgcgaggattgtgatgtatttcgggttacggcgcagcagcttttctgtctgatgaaccagatagtccagaccgccagcaacctgcatggcagaaatagcggcgataaccgccatgataatggaaatgacatcgaacgggatgttaccgggtttaacgccaatagcggcaagaaccagcacccccaatccgcctgcaaaaccaatacctattccccccaatctggcgcccaagaagatcgccagcaaaactatgatgagttctacaactagcatattagccttccttgttttttaacaagttgatattagattgttatttttaagttactgctcacaagaaaaaaggcacgtcatctgacgtgccttctttatttgtactaccctgtacgattactgttcgctttcatcagtatagcgttttgctttgtaagccgggtgcatcagattctgtacggagaaaatatcgtcaagttccgcttcagtcaacagaccgcgttccagaacgacttcacgtacactcttaccggtttcggcacagattttacccacgatgtcaccgttgtggtgaccgatgaacgggttcaggtaagtaacgataccgatagagttgtaaacgtaaccttcgcacacttctttgttagcagtgatgccgttaatgcatttttccagcaggttgtagcaagcgttggtcagaatgtgaacggattcgaacatagcctggccaatgaccggctccataacgttcaactgcagctgacctgcttctgctgccatggtaacagtggtgtcgttaccgatgactttgaagcatacctggttaaccacttccggaacaaccgggtttactttagctggcatgatggaagagcccgcctgcagttccggcaggttgatctcgttcaggccggcacgtggaccagaagagagcaagcgcaggtcgttacagattttggacatcttcacagccaggcgtttcagcgcgccgtgaaccataacataagcgccgcagtcagaggtcgcttcgatcaggtcttcagccggtacgcatgggaagccagtgacttcagccagttttttcactgccagcggagagtactctttcggcgtgttcagaccagtaccgattgctgttgcgccaaggttaacttccagcagcagttcagcggtacgttggatgtttttcacttcttctttcagcaggatgctgaaagcgcggaattcctgaccgagggtcatcggtactgcgtcctgcagctgggtacgacccattttcaggatgtcctggaattcgacagctttacgttcaaagccttcacgcagttggttaatcgcatctaccagcttaatcagggaagagtaaactgcgatacggaaaccggtcgggtaggcgtcgttagtggactgacatttgttaacatggtcgttcgggttcaggtactgatattcacctttctggtgacccatcagttccagaccgatattggccagcacttcgttggtgttcatgtttacggaagtacctgcgccgccctggtagacgtctaccgggaactgatccatgcattttccgttgttcaggacttcatcacatgcggcaatgatggcattcgctacacttttaggaatggtttgcagctctttgtttgccatagctgcggcttttttaaccattaccataccgcgaacaaattcaggaatatcactgattttgttgttgctgatatagaagttttcaatcgctctcagagtgtgaacaccatagtaggcatcagctggaacttccctggtacccaacagatcttcttcgatacgaatgttgtttgacatgtgaaccttctttttcaagctgccaatgatttgctttaaacacacagaatatatgtggtttcgaatgtttttcgaccgacgattatcccctgcatcgaccgaatacccgagatcatatgctgcttgaggatttctaccgtaatctggatcactttaagtgtcggtttttaccccttaattattaatttgtgaaatagatcaccgctttgggattactaccaaaaatagttgcgcaaacatcttgaaattttgctaatgaccacaatataagctgaacgcgattcgcaacccattcaggtagccgggtttaaccggctgctattacaggagaaacctttgcgctggttaccttttattgccattttcctttatgtctatattgagatttcaatctttattcaggttgcccatgtattgggggtattgctgaccctcgtgctggttatattcacgtcagttatcggtatgtcactggtacgtaaccagggctttaagaatttcgtgctgatgcagcaaaaaatggcggcgggtgaaaaccctgcggcggagatgattaaaagtgtttcgctgattattgccggtttgctgcttttattaccgggctttttcaccgacttcctcggtcttctgcttttattgccgccggtgcaaaagcatctgacagtgaagttgatgccacatttgcgcttttctcgcatgccaggcggcggttttagcgccgggaccggtggcggtaatacttttgatggtgagtaccagcgaaaggatgatgaccgcgaccgccttgatcataaagacgatcgctaggattaatgtcgaaacgccggattatgtggttatgccattttccggcgtttttcgttttggcagaaacagccataaccccgccagcataatcagcgcatagagacttttccagccgaccattgccagtaacagaacgcataacagcccgccaaccaccgccagtagtcgataacgtccttgcaataatttacagcctgccagcatgcataacagataaatcataataaagatgccattggcataaataataagagcgtccagattgatctctaaagcatgaatcaccaaagtgctcaccacgcagcagccgagcaccgcattgagggcattattcgggatatggcgagaagagaggcgtgccaggtagtggtcaggattatgttgcgcctgcgaccagaccaggcgggcgaagctctgtatataaatgttgagactggcaaagcaggtcagatagccaattacgcaggcaatccataacgctcctacaccgaacagttgcactacaatttttggaagcgatgctgccgcggccatttgtttaccataggcgtcgaagtgtaagacgactaccgtacagccccagtagactaatcctgccagcagcagaccaatcatcaatgcgcgaggaaaatcacgctctggatttttaaattccgaggcaagatgggcaaatgcttccagaccgacaaaacaccagaacatcactgataacgcagcaaataacccggtaagttcgatattaccaggtgccgggaaggggatattcgcaggtttgatatcgcccgcccaccagatagcgacaatcagcgcgacgataagtccggcaataacggtttgtagattagcactggaactggcaccgcgagtaccgatataccacaccagcgccagcgtaccgagttctgccaacaacagttgccagctatgccagccaaacattgcctggccgaacccggcggcaatttgtagcgcggcaggcaaacccacgggaatgaccgataaaaacaaccagccggtgactcgctcaagccgcgaaccaaacgccataccgacgaagtgcgcgacaccgcctgcgctgggatagtggcgacccagaatcgcaaacacaatcgcaatcgggaacactaagataatcaaaacgggccacgcccacaggctgttattgcctgctacctgtgcagctaacgcaggaacggcaaacacgccggtgcctaataatgacgtcgatagcaggccaatgccctgggccagccccagttcttgtttgagtccactcatgggttgatatccgattgcgcccaaattttgggcaactgcgtagattttcgatggtagcacaatcagattcgcttatgacggcgatgaagaaattgcgatgaaatgtgaggtgaatcagggttttcacccgattttgtgctgatcagaattttttttctttttcccccttgaaggggcgaatcctcatccccatttctctggtcaccagccgggaaaccacgtaagctccggcgtcacccataacagatacggactttctcaaaggagagttatcaatgaatattcgtccattgcatgatcgcgtgatcgtcaagcgtaaagaagttgaaactaaatctgctggcggcatcgttctgaccggctctgcagcggctaaatccacccgcggcgaagtgctggctgtcggcaatggccgtatccttgaaaatggcgaagtgaagccgctggatgtgaaagttggcgacatcgttattttcaacgatggctacggtgtgaaatctgagaagatcgacaatgaagaagtgttgatcatgtccgaaagcgacattctggcaattgttgaagcgtaatcctcgcacgacactgaacatacgaatttaaggaataaagataatggcagctaaagacgtaaaattcggtaacgacgctcgtgtgaaaatgctgcgcggcgtaaacgtactggcagatgcagtgaaagttaccctcggtccgaaaggccgtaacgtagttctggataaatctttcggtgcaccgaccatcaccaaagatggtgtttccgttgctcgtgaaatcgaactggaagacaagttcgaaaacatgggtgcgcagatggtgaaagaagttgcctctaaagcgaacgacgctgcaggcgacggtaccaccactgcaactgtactggctcaggctatcatcactgagggtctgaaagctgttgctgcgggcatgaacccgatggacctgaaacgtggtatcgacaaagccgttaccgctgcagttgaagaactgaaagcgctgtccgtaccgtgctctgactctaaagcgattgctcaggttggtaccatctccgctaactccgacgaaaccgtaggtaaactgatcgctgaagcgatggacaaagtcggtaaagaaggcgttatcaccgttgaagacggtaccggtctgcaggacgaactggacgtggttgaaggtatgcagttcgaccgtggctacctgtctccttacttcatcaacaagccggaaactggcgcagtagaactggaaagcccgttcatcctgctggctgacaagaaaatctccaacatccgcgaaatgctgccggttctggaagccgttgccaaagcaggcaaaccgctgctgatcatcgctgaagatgtagaaggcgaagcgctggcaactctggttgttaacaccatgcgtggcatcgtgaaagttgctgcagttaaagctccgggcttcggcgatcgtcgtaaagctatgctgcaggatatcgcaaccctgactggcggtaccgtgatctctgaagagatcggtatggaactggaaaaagcaaccctggaagacctgggtcaggctaaacgtgttgtgatcaacaaagacaccaccactatcatcgatggcgtgggtgaagaagctgcaatccagggccgtgttgctcagatccgtcagcagattgaagaagcaacttctgactacgaccgtgaaaaactgcaggaacgcgtagcgaaactggcaggcggcgttgcagttatcaaagtaggtgctgctaccgaagttgaaatgaaagagaaaaaagcacgcgttgaagacgccctgcacgcgacccgtgctgcggtagaagaaggcgtggttgctggtggtggtgttgcgctgatccgcgtagcgtctaaactggctgacctgcgtggtcagaacgaagaccagaacgtgggtatcaaagttgcactgcgtgcaatggaagctccgctgcgtcagatcgtcctgaactgcggcgaagaaccgtctgttgttgctaacaccgttaaaggcggcgacggcaactacggttacaacgcagcaaccgaagaatacggcaacatgatcgacatgggtatcctggacccaaccaaagtaacccgttctgctctgcagtacgcggcttctgtggctggcctgatgatcaccaccgagtgcatggttaccgacctgccgaaaaatgatgcagctgacttaggcgctgctggcggtatgggcggcatgggtggcatgggcggcatgatgtaattgccctgcacctcgcagaaataaacaaacccccgggcagaaatgtctgggggtttttcttttggtcatctttctagtataagattcagacacggacgacgcgagtggcgtccagctcattgattatggggaataacatgcacgtaaaatacttagcagggattgtcggtgccgcgctactgatggcgggttgtagctccagcaacgaattgagtgctgccggtcagagtgtacgcattgtggacgagcagccaggcgcagagtgccagctgattggtactgcgacaggtaagcaaagcaactggctttccgggcaacacggagaagagggcggttctatgcgcggcgcagcaaacgatctgcgcaaccaggcggctgcaatgggcggtaacgtgatttatggcatcagcagcccgtcgcagggaatgttgtccagttttgtcccgacggatagccagattatcggtcaggtttataagtgcccgaactgatgtgatccagaggctgggtgacaaacgtattattgcctgatgcgcttcgcttatcaggcctacagcaggcattgcaactgattgaatgcttgagaatttgtaggccggataaggcgtttacgtcgcatccggcatgaccaacgatcacgttatcagtcatttcaggctggatggctccagcctcgcattagcaaagatgagattatttcgcctgtggtgcagttttgctggtggattgaacacgtaagtgatgcagcgcgcgtaagcattgatcctgggttagcggttgggcgttattcgccgctacggtgcgaacatagacctgacatggcacacccgcgagttttttcagtcgtgggctgaaatcaagcattcggcgagtgatcgcctctatttctttacccggcgttgcttcacgcgttttcaccactgtgccgctaaattgttctttgccactttcatctttaaagcggtaaagcaccgccagataatggtcgaacaggttatgtttccattccggttgggaataggtgtcatattccagattgccattgtcctggcagtcaacgtcgtataacggcaggaaatctaacagtgaggtaatacgtaatgccagttcacgcatttccgcattattaattgcatgaatgattgctcgcgccagcatttcaatctgcaactcattgacgactaactcacatttgctaccgtcatgtagcgttaatacgaaggtaagattttcgccttgattatcggtaagttccagcgtgttaacccgacgattaatatcggcatttttaagctcatcaaccagaatttctgggatgttttctgccattttcttaatgactttatcgcgagcttgctcatactgaaggcgtgcagcagcattcagtttatgcttttgatgcagacgactttccagcgcaatcagcaggtcgcgcagttccatgacagacataaagaacaacgattctttattgcgaggttctttaattttcagcgccagtgcaatgaaattattactcttgcgaataacaccggtattaacacccttgatgcttatggccatgtaggttctccctaaccatttctcaattaaataattaattttaatttataagccagataaatgggcttggtagtaatagttgttaaaataacataaatagccgtactcactctatataaacagaaaagaaaggttaattattggtgttggctatataaagagtaacaacagcaatgtatatgaataattaaaggttatgcaacgggcaaagattaaatttcccagtttaatgacaggttgctgtacttgcgtttgttgctcttgccggatgcggcgtaaacgccttatccggcctacagttcattgcaaatccattcaatttcaatgcacaatgtaggcctgataagcgtagcgcatcaggctaatgtttaacttccctgtttaatcagttactgctggcgtagctggagatccagcggcgttttgctgggttcgccgccaatttctcgcgccagtttcggcaccagatatcccgacaccaatgtcagcaactcacgcataatctgccgtgcttcgtcatcactcaccataaaatgcgccgcgccctgtactttatctagcacatgcaggtaatacggcatcacgccggcatcgaacaacgcattactcaggtttgccaacgtttgtgcgttatcgttcacaccacgtaacagaacgctctggttaagcagggtgacaccgacacggcgcaatttagccatcgcctgacggaacgtttcatctacctcattggcatgattgatgtgattcaccagcaagatttgcagcgtagaacgggcaaagcgttcaaccagcgcctcggtgatacgtgccgggatcacaatcggcagacggctgtgaatccgcagacgtttgatatgcgggatggcttccagttgtgtgagcaaccagtccagctcgtgatctttcgccatcagcggatcgccgccggagaaaatcatctcgtccagttccggatgcgcagcaacatactcaagtgcagtctgccagttacgcttgttgccctgattttcggcataggggaagtggcgacggaagcaatagcggcaatttaccgcgcagccgcctttgaccagcaaaagcgcccggttgtggtatttatgcaacaaaccaggcactacgctgtgctgttcttccagtgggtcggtggagaatccggacgcgacgacaaactcatcttgcgaggtaagtacctgacgcaaaataggatcgtccggattgcctttctccatgcgatcgataaatgagcggggcacacgcagggcaaacagctttttggcgctgcgtccggccaacagtttttcgtccgcgtctatattcaaaagacgcagaagttcaccaggatcggtcacaacatcggcaagttgcgttaaccaatcttctctggatggggtatttagggttacaatatgcgccattttgtggcttagctaccaattaacaaatttcagagggccttatggcaacgtactatagcaacgattttcgtgctggtcttaaaatcatgttagacggcgaaccttacgcggttgaagcgagtgaattcgtaaaaccgggtaaaggccaggcatttgctcgcgttaaactgcgtcgtctgctgaccggtactcgcgtagaaaaaaccttcaaatctactgattccgctgaaggcgctgatgttgtcgatatgaacctgacttacctgtacaacgacggtgagttctggcacttcatgaacaacgaaactttcgagcagctgtctgctgatgcaaaagcaattggcgacaacgctaaatggctgctggatcaggcagagtgtatcgtaactctgtggaatggtcagccgatctccgttactccgccgaacttcgttgaactggaaatcgttgataccgatccgggcctgaaaggtgataccgcaggtactggcggcaaaccggctaccctgtctactggcgctgtggttaaagttccgctgttcgtacaaatcggcgaagtcatcaaagtggatacccgctctggtgaatacgtctctcgcgtgaagtaatgcggttgtggtgcggcctgcaggctgcaccatcacttattcaggtcagagatgatgaaacgccttatcgttcttgttttgcttgccagcacgctgctcacgggctgtaacaccgctcgcggtttcggcgaagacatcaaacatctcggcaactccatctcccgcgctgccagctaatttttcttctcttccgaaaaatcatcagatttccatcatttttggcgatgttgtctattattaatttgctataggcaaacataaataacattacctaaaaggaagacgttatggtgaagaagacaattgcagcgatcttttctgttctggtgctttcaacagtattaactgcctgcaacaccacgcgtggcgttggtgaagacatttctgatggcggtaacgcgatttctggtgcagcaacgaaagcgcagcaataagcaataacggtacgacagttatgtcgtgccgtttgtttttttgcgatagtcacaaaggtaatagttgaaattcccctgccacctggcaaaatatccgttcaaccatcagctttgcaggacgacctgcaaacgcctcttttcaccggggacggccccaattctccggagcctgatatgtcctggattatcttagttattgctggtctgctggaagtggtatgggccgttggcctgaaatatacccacggctttagtcgtttgacgccaagtgttattactgtgacggcgatgatagtcagtatggcgctacttgcctgggcgatgaaatcgttaccggtagggacggcttatgccgtgtggacgggtattggcgcagtcggcgcggccatcaccggcattgtgctgctcggtgagtccgctaacccgatgcgcttggcgagtctggcgttaatcgtattggggattattggtctgaaactcagcactcactaactaccgggctgctgtacccaaataaacttactgacatcaaacccttcccgggtcgcgactgccagcatctcctgtttcacttcgtcagaaatggttggcgtgcgggagagtatccacaggtagtcgcggtccgggccgcaaaccagcgcatggcggtattcccgatcaagtgcaatgacgttataaccgccatagaaaggaccaaagaatgacactttcagcgcagcgcgtgttggtgcgccggtaaagtacgctttcccttcactctgctgccacatttctctgtcagggttatagcctttattgatgacattcaggccgccgtcatcacgcagactgtatgttgcggtgactttttccagtccacgttcaaaacggtgatcaaaacgggcaatctcataccaggtaccgagatagcgtttagcgtcgaaattattcactactgtcacgccacgcggcggcgtaggagaactgcaggcaacgaccagaaatgcagctgtcgctgcggcaacgagagggagcaggcgcataaatgtttccttactggtttttttctaagtgtagatgacagcaaggaaaagcgcagaaaaggtccgaaaattcggacccgatgaaattttactgtagagcgttgagaatctgacaggcggcggcgactctcgctggattgggatagtttttgttagccagcatcacgatacccagctctttttctggaataaacgcgacatagctaccaaatccgccggtcgcccccgttttatgtacccatgatgcgcgtactgcaggagttgggggcttaatcgcttttaccgggcgtgctgccagtgcaattttattgtcactgccgttaatgatgctgtcaggattgaccggccagtccagcatttcccagcccaggccctgatacatatcgccggtttgccagtagcgagattgtgccagttgtatcccttgttgaagcgttttctcattgatatcaaggggggttaaattgctttgcacccagcgggccatatcttcaatggtcgacttcacaccataagcttcagcatctaacgcccctggcgaaacatgcactgccttaccttcgcgatatccccaggcgtaattcttttcttctgggggaggtacattaatccacgtatggttgagtttgagtggctggaagacacgagtttgcatcgcctgctcaaaactcaaaccagacggcttcacagccagtgcgccgaacaaaccgatactggagttggcatacagacgttgtgttcctggagcccatgcaggctgccagttttgatagaagcgcagcaagtcgcttgaggatttcacttcatccggcacctgcaatggcaggccgccagcggtgtaggtcgcaagatgtaatagtgtgatcccattccactgtttagcagtaagttcaggccagtattttgttgcgggatcgcttaacttgatttcccctcgagcaatagcgtcgccaccaagcacgcccgtaaatgttttgctgaccgaacctaactcaaacaacgtttgctgtgtgacgggctgctttttggcgatgtccgcatagccccaggtaaagtaataaggtttaccctgataaattaccgccaccgccataccggggatcttttgttgctctataagcggggtaattgtgcgatgcacaatatcgttgatttgttgaggggcagcaaatgtggagcaagaggcggtaattaataaggcgcagagcgtcgttttgaacataaggtctggtttccatacaaaacggcccgccataggcgggccggatttacattggcgatacgttagattgtaacgataccaatcagcgtgacaactgtcaggatagcagccagaccgtagaaaacccatttgcccgcaggcacgtgaattttcagatcgtgcatcgcgtggtgcatacggtgtaaaccacaccacagcggcagaacgatcatcaggaacaggaatacgcgaccaatgaagctctgcgcgaacgccagaacgcgctcgtagctcagcgcatcacccggaaacagccccagtggcagcagaatacccaccagcaggatcatcaccggcgcaataattgcgctccacataccaccggccccgaagaggccccagaataccggttcgtcagaacgctttggatttggattaatcatctcaggctccttaccagtacagggcaacaaacaggattacgatggtggcaaccacagttaccgcccagagacttttgataattggctctggtcccattttttcgtcttttacaatgatattggccgctttcggtgccagttcaaaccaggttttggtgtgcagcagagctgccgccagagtgatcaggttaatgatcacgataaccgggttttgtaaaaagtcgacgaatcccgcccaggcttccgggccatttttcagggcaaacagcccgaaaatcagttcaatgctgaaccacacagccggaaccgccgtgccttcgcgcagcatgtaaaagcgataaaacggcaattttttccaccaggtggacgtcattggccgtacatacggtttacgtttagtcgtcatgttgcactccttagcgtggtttcagggtcgcgataagaaagtctttcgaactttctactttgccctgctgaatggccgcagccggatcgacgtgtttcgggcagacttcggagcaatagcccacgaaagtacagctccatacgccgttctggctgttcaactgcgccatacgctccttcttaccgtggtcgcggctatcttcgttataacgatgcgccagcgtaatggcagccggaccgatgaactctgggttcaggccaaactgcgggcacgcggcgtagcacagaccacagttgatgcaaccggagaactggtgatactttgccatctgcgccggggtctggatgttagtaccctgatccgcggtgcgggagttgccgatgatgtacggtttgatcgcttccagactttcgatgaagtgggtcatatcgaccaccagatcgcgttcaatcgggaagttagctaacgcttcaaccttcataccgtcggtgtaatcacgcaggaaggttttacatgccagttttggcacgttgttaaccatcatgccgcaggaaccacaaatcgccatacggcaggaccagcggtaactcaggtccggtgccaggttgtctttgatgtagcccagcgcatccagtaatgaggtagttgcgtcataaggcacttcatagaatgcgctatgcggtgcggtatcgacttccgggttatagcgcaccacctcaattttcaggtttttcatctcagccattcgccttctccttcttattggctgcttccgccttatcggctgcatccgcttcgccaccgtaaacgcgtttagctggcggcagcgtagtaatcttcacgtcgctgtactctaggcgagtcgtgccatcagcatcgcggaaggcgagggtgtgtttgaggaagttgacgtcgtcacgctcggtgcaaccttcgtccagacgctggtgtgcgccgcgggactctttacgtgccattgcggagtgcgccatacattcagcaacgttcagaccgtggcccagttcaatggtgtagagcaggtcggtgttgaacacgctggaggtgtcggtgatgcgcacgcgcttgaagcgttcctgcagctctgccagcttgtcgatggttttctgcatcagttccggcgtacggtagataccgcaaccttcttccattgccaggcccatttcgtcgcggatcttcgcccagttttcgccgccatcctggttaaccagatctttcagacgttgttcaacgccagctgcctgcgcttcaattgccgcttcgttgccattaccggcagttgctgcacgctctgtcgcttgttcaccggccagacggccgaagaccaccagttccgccagggagttggagcccagacggtttgcaccgtgcagaccaacagaggaacattcacccacggcgaacagacctttaatgcgggtttcacagttctgatcggtttcgataccgcccatggtgtagtgtgcggtcggacgtaccggaatcggttctttaaccggatcgacgccaacgtacgctttcgccagttcgcagatgaacggcagacgttcatgcagttttttctcgccgaggtgacgcaagtcgagataaaccacatcgccacgcggcgtggagatggtgttgcctttacgccattcgtgccagaaggcctgagaaactttgtcgcgtggacccagttccatatatttgtttttcggctcgcccagcggagtttccgggcccatgccgtaatcttgcagataacggtagccatttttgttgaccagaataccgccttcaccacggcagccttcggtcatcaggataccggaacctggcagaccggttgggtgatactgaacgaattccatgtcacgcagcggaacgccgtggcttagcgccatacccataccgtcaccggtaacgatgccgccgttggtgttgtaacgataaacgcgacccgcaccgccagtagccataacgaccgcgttagcacggatctgcaccagcgtgccttccatcatgttcattgctaccaggccgcgaacatgaccatcatcaaccagaatatccagcacgaaatgttcgtcaaaacgctggatctgcgggaattgcagagaggtctggaacagcgtgtgcagcatatggaagccggtcttatcggcggcgaaccaggtgcgctcgattttcatgccgccgaagcgacgtacgttgacgctaccatccgggcgacggctccatgggcacccccacagttccagttgggtcatttcggttgggcagtggtggacgaaataatccacgacatcctgctcacacaaccagtcgccacccgctactgtatcgtgaaagtgatattcgaagctgtcatgatcctgcgcgacagcggcggagcccccttctgcagcaacggtatggctacgcatcgggtatacttttgagattagtgcgatttttgcatttggatttgcctgcgcggcagcaattgcagcacgtaatcccgcgccaccggcgcctacaatggcaagatcggcttgaaaggtttgcacgacattcctccagattgtttttatcccacagccccgtacttcagggtaagtgcctgaaagttacggtctgcgaacgctattccactgctcctttataggtacaacagtatagtctgatggataagtctgaaatttgacgagatcgatttttttagtgcgcaagagggctaaattatcactgaagatgattaatttaattactaaaccatcagatcgtgctttttttagtcactgcccaccgctgtttgattcctgcgtaaaatttgtctcgccgtcgcgttgcgagtagacttcgtgcccttgtcaaaaactggagatttaactatgagcgaaacggcatcctggcagccgagcgcatccattcctaacttattaaaacgtgcggcgattatggcggagatccgtcgtttctttgccgatcgtggagtgctggaggtggagacgccttgtatgagccaggcgacggtaaccgatattcatttggtcccgtttgagacacgtttcgttggccccgggcattcgcaggggatgaatctctggttaatgaccagcccggaataccatatgaaacgcctgctggttgccggttgtgggccggtattccagctgtgccgcagcttccgtaatgaagagatggggcgttatcacaaccctgagttcactatgcttgagtggtatcgaccgcactatgatatgtaccggttgatgaacgaggtggacgatctcttacaacaggtgctggactgcccggcagcagaaagcctttcttatcaacaagctttcttgcgttatctggaaattgacccgctctctgccgacaaaacgcaactgcgggaagtcgcagcgaaactggatttgagtaacgttgctgataccgaagaagaccgcgacacgttgctacaattgctgtttacctttggcgtagagccaaatattggcaaagaaaaaccgacctttgtgtaccactttccagccagccaggcatcactggcgcaaatcagtaccgaagatcatcgggtcgctgaacgctttgaggtttattataaaggtattgagctggcgaatggtttccatgaattaacggatgcccgtgagcagcaacaacgctttgaacaagataaccgtaagcgcgcggcgcgcggtttgccgcagcaccccattgaccagaatctgattgaagccttgaaagtcggtatgcctgactgttccggcgtggcattaggtgttgatcgtctggtgatgttggcgctgggcgcggagacactggctgaagtcatcgcctttagcgttgaccgggcataattctgaaaaattactgaattaacagcgaagaatggcgtgataagcgccattctgtagcatatgttttcatttttccgttaaaggccacaatttaagactggatatttgatatcatccgggtatcaattctgtattggtttttacgctgcctgctcaatgttgcgcagtgcagttcagtgggcacgtgttatacacgcgctgaaatgaaggatggtttcatgcctcacacgataaaaaagatgagtctgataggactcatattgatgatctttacttccgtatttggatttgccaatagcccatcggcttattacttaatgggttatagtgcgattcccttttatatattttctgcattgttattctttattccattcgccttaatggtgatgctgccaacttactgatttagtgtatgatggtgtttttgaggtgctccagtggcttctgtttctatcagctgtccctcctgttcagctactgacggggtggtgcgtaacggcaaaagcactgccggacatcagcgctatctctgctctcactgccgtaaaacatggcaactgcagttcacttacaccgcttctcaacccggtacgcaccagaaaatcattgatatggccatgaatggcgttggatgccgggcaactgcacgcattatgggcgttggcctcaacacgattttacgtcacttaaaaaactcaggccgcagtcggtaacctcgcgcatacagccgggcagtgacgtcatcgtctgcgcggaaatggacgaacagtggggctatgtcggggctaaatcgcgccagcgctggctgttttacgcgtatgacagtctccggaagacggttgttgcgcacgtattcggtgaacgcactatggcgacgctggggcgtcttatgagcctgctgtcaccctttgacgtggtgatatggatgacggatggctggccgctgtatgaatcccgcctgaagggaaagctgcacgtaatcagcaagcgatatacgcagcgaattgagcggcataacctgaatctgaggcagcacctggcacggctgggacggaagtcgctgtcgttctcaaaatcggtggagctgcatgacaaagtcatcgggcattatctgaacataaaacactatcaataagttggagtcattacccgccttaatgatggctgaaatgggagctgcttatcgcaaagaagaaggtggtatctattcctggatgaataatagtgtcggaccacgttttgccttcattggtacgtttatgtggttttcctcttatatcatctggatggtgagtacctccgcgaaagtttgggtaccgttctcaacattcctctatggtagcgacatgacccagcactggcgtattgccggactggagcctacgcaggtggttggtctgctggcagtagcatggatgattctggtcaccgtcgttgcttcaaaggggattaataaaattgcccgcattactgcggtgggcggtattgcagtaatgtgtctgaatttagtattgctgttagtaagcattactattttgttattaaatggtgggcatttcgcgcaggatattaatttccttgcatcaccgaacccgggttatcagtccggtctggcaatgctatcgtttgtggtatttgctatttttgcctatggcggaattgaagcggttggtggtctggtcgataaaacggaaaatccagaaaagaactttgccaaaggtattgtttttgccgctattgttatttcaatcggttattcgctggcaatatttttatggggcgtcagcacaaactggcagcaggtattaagtaatggttccgttaaccttggcaatattacctatgtgctgatgaagagcctcggggtgacgctgggtaacgcactgcatttgtcacctgaagcgtcattgtcgctgggcgtatggtttgcgcgtattaccggactttcgatgttcctcgcttataccggtgcgttctttacgctttgctattcaccgctgaaagccatcatccaggggacgccgaaagcgttgtggccggaaccgatgacgcgcctgaatgcgatggggatgccgtctatcgccatgtggatgcagtgcgggttggttactgtcttcatcctgctggtttcgtttggtggcggtaccgcatccgcgttctttaacaagctgacgctgatggcgaacgtgtctatgacgcttccttacctgttcctcgcgctggctttcccattctttaaagcacgtcaggatctcgacagaccatttgtgattttcaaaacgcgtatgtcggcaatgattgcgatggtggttgtcgtactggtggtgacatttgcgaacgtcttcaccattattcagcctgtggttgaagccggagactgggacagcacattgtggatgattggcggccctgtcttcttctcgctgttagcgatggcgatttaccagaactattgcagtcgcatggcgaataaacctgagttagctctcgactgatcatatgaaatcctgcaactcatcgtctctccggcgatgagttgtcaggaagtaatgcgtatggatgatactctccagggccggtgataactgaagatgatgttaagctgctaaatgagccacgttgacatcatttggcagcttcatgcattacaaacttcccgcctgacgacctttgcccgcagacgtcagcgttctccccgtttgtttaccgttgaggctttccagacgcatctggaagggcgggaatggcatatcgataccgtgggcatggaagccagccagaatcagctggtggatctcatggcgtagcggcatacggtgacccatctcagcggcataaatacgcagctcgaaaatctgaatcccttgttgcagatccaccaggaagacttccggtgccgggttgtcgatcaccagcgagcagcgacgcgctgcggtgagcaggatttccgtcacttcttcactgttggcatcagcaggggccggaatcgtcaacactacgcgcgtgaccgagtcagagagcgaccagttgataaactgctcggtaataaacgccttgttcggcacgattatctctttacggtcccagtcgctgatggtggtggcgcgggtgttaattttcgtcacgctaccggtgagatcgcgaattgtcaccgtatcgccaatgcgaatcggtttttcgaacaggataatcagaccagagataaagttggcgaaaatttcctgcaaaccaaaaccgagaccaacaccgagcgcggcgaccagccactgcaatttcgaccactcaataccaatcatcgagaagccgaccagcccgccaatcagcatcagcagatatttggtgatggtggtgatggcgtagcccgtacccggcgttaaatccaggtgctgcaaaatcgccagttccagcagcgcgggcaggttgcgcaccagctgcgtggtgatgataaacaccagaatggcaatcagcaccgcaccgagggtaattggctccagactttctacgccctgtaccgtggaggtgacatcccacagcgaaatattttcgaggaagccgaaagcggaatggatttctgaccacagcacaatgacagaaagcagggcgatcaacatcaaaattgagcgcaccagccgcaaggattgcgcactgatggcatcgagatcgacttcgctttcatcgacttcaattgctccttccgggctactgtgatgatgcgcttcctcttcgccacgcgcacgttgcgctaacatctctgcccggcgatgcttcgcccggtcaaacgccagcctgcggcgctggatcagcatccagcggcggataacgtgataaaccaccagtagcaggaaccagatggcaaccgaggtttcaagcctcgctaacagcgcctgtgccgttgccagataacccacagccgacgccagaatggcaaccaacggcgcgccaatcatcatgttccacagcatatggttggtaatgttgtcgccgctgccttctttgttgagatacagcggaatcccggcctttttcaggctgagggtgaccaccgccagcgcaccgcaaatgaggataaagcaaagccttcccagcgaaccggagaattcacggtcgtcgaggttatcgaacatcatcagcgccataatcagcggcacaataagcccgatgctcatcaggtagtagcgcatcccacgagatacgcgttcgcgcggccagccaaaatgagcgataaacaagccgttcgggcgggcaaaggtggcgcaaatcatcactacccacagcagcggcacggtggccgttacaccatcgccaatcgcgaccgccagcggataaggccacgcctcgcgcaagccgtaacccagcgtcatccacagcaccggtaacggtgacgcgacgagaatcgaccagaaaagagtgcgcaacgtcagccagaagtgatcctgagtcactttgccaactttcgccgccgaacgttcaagaaaacgggtgaaatagcggcgcgagtaaatactgcaaccgaccagaatcaacgcgccaaacagcggcaaaattgtctctttgctggtcagcatcatcacactggctttgcccaactgactgaaggtgtccagcgaaatgagacgacgcagatcctgggcgatttccagcggccaggcgatggtcatcgggcgcacgtcagaggtccagaacagatagcggtgcgttgcttcgttcacctctttcagcgcatcctccagttgcccgttggagactttcagcttggtcagttccaatagtagcgtgtcgccaccctgcaacaatgagttcagcaactcacgctgagtgcgcagttgtgcttccagaatacggttttgctcggcggtcagcggctgaccgtcggcctgatggatttgccgtagcagcggctgtttattaagcagatcctcataacgtaaccgttgcacacgcaactgcgccatttcggtatcaagctgttgtggttttggcatttctggtagccgtgccacctgcgctcgcaacgcttcaccgagcagattggacgatcccagccattgcgactgttcacgcagcgtattcaacgcctgccggacctgtaacgtctggctggcagcctgacgctgttgcgaggcaacgagatccatccgctgcgcctgttgattcagcgctgccgatagttcgcggttaattttgaattgcgcgacgatatctttcggcaaatcggcactgttttctgccagtaattcggtactttccagcgcccgctccgcctcaagctgacgttggctattcaactgattacgtaaggcctgcaaatacgcatccagttgctggctctctttttccgcaagctctgagcgtaagcgcgctaattcttggcggttattggcagacagctgcgccagctccagttcatcaacgagcgccttaagacgtgcagagtcagactgcaacgcgaaattttgtgcctgattgagcggagtattgccggtaagcgttcccaggcggcgctcgatctcatttaactgacggcgggcgtcggtttgctgttgcggcagttgattcagcgaatcggcaatctcgcgggcgcgctcctgctcttgctgggcctgacggcttttatccagcaactggctgctgacctggagaatttcctgattcagcgcgtcggtagacattcccggcgacacgctgcgcggcttgtcacgcatgttgtttaattgtgcgcgcagagtagcggagagtttcggataattatcgataacttgctgatattgtttgatgcgctcaagggaaccttttcgttcctcaagcgcatttaaggcagactgaagcgcctctacgacttccggctgtgcgggtttcgccgcttttgcctgctccagttcctgagtgatttgtttgctatcgggggccgtcgcggcgtacgccccccaactgaggcaccaggccatcagaaaagtgataatcaggcgcacgtcagcgtttcctttgatggattagacctggtcttttttgtcgtcaaccaatgggctggcgtcgtgttctgcttcgatctcttcagcaggaagcggggcaggttcagcgtctggcgtaacaaaggtttcggtagatactgccagcggctggcaaattttcgtgacagacaggctttccagttgctcaaccagattcactttacccggtgcaaacaggttgataacggtggaaccgagtttaaagcgacccatttcctggcctttcagcagtgccacagaaccgtcgttttccccggcaggccaggtccagcgcttgatgataccttcgcgcggcggcgtaatggtgcccgcccagaccgtctcaatgctgccaacaatcgtcgctccgaccagaatctgcgccattgggccaaattcggtatcgaaaaggcaaatcacgcgttcgttacgggcaaacagattcggcacgttctgagccgtgagatggttaacggagaagagatcgcccggcacgtagatcatctcacgcagaataccgttgcacggcatgtgtacgcggtggtagtcacgcggggagaggtaagtggtcacaaacgtaccgttgcggaacaggtccgccatcagatagttgcctgccagcagggcttcgaggctgtagttgtggcctttggcttgcaggattttatcttcttcgattttacccaactggctgataacgccatcggcaggcatgaccagtacattcggatcggtatcgattgggcgtacttcgtcacgcagcggacggacaaagaattcgttaaaggtgcggtagctggcggtgtccggcttttgcgcctctttcatgtcgaccttgtagtatttaacgaacagatcgataaccagttttgtcaaccatcctgcccgcttgcttgcgccccaacccgccaggcgagtaagccatagtttcggcagaatgtactgtagcgaaagtttaaatgaatttaacaaggtagcctccaggccattgttttgtcgttcctgattcggcctacatgccggatcctgaaaaaaaggggacgattctaacgacggttagcttaattgtcagtcatccgtatcagaaaagtttttacgcgtttttacctgcgccatgctttccagaatacggtgatagttttcgaaacgggtttccgcgattttcccttcctcaaccgcttcccggatagcgcagcccggatcggtatcgtgtttgcaatcgcgatatttacacagacctaaatagtcatggaattcgacaaagccctgagtgatttgttccggctccaggtgccagaggccgaactcacgcacaccaggggaatcaatcacatcaccgccgtgcgggaagtgatacagccgagcggcggtcgtggtgtgctgaccaagccccgagttgtcagagacatcgttggtcaggatctctttttgcagccccagcaacgcgttcagcaggctggatttgccgacgccagactgcccggcaaaaatgctgatgcgcccggtcaacgcctcttccagcggttttagcccatcctgagtatggctggaaaccatcaatacgcgataaccgatattgcggtagatatccatctgctcgttgacgaacgccatgccttcgtcgtccagcaggtctatcttgttgagcacaataatcggctcaatctgcaaggtttcgcaggccaccaggtaacggtcgataatattgagcgacagctccggcaaaatggcggagacaatgacaatctggtcgatgttggcggcaataggttttacgccgtcgtagaaatccggacgcgtcaacaccgaggtacgctcatgcaccgcttccacgatccctttgacatttacgccttccgccgccggtttacccggacgccagactacgcggtcgccggttaccagcgaacggatggtacggcgaatattgcagcggtgaacgtcgccatcggcggattccacatcagcgtgcataccaaagcggctgatgacgataccttcatcaggctcgccaaacagattgtcgtcgtagtcgggcttctccttagacgttttaagacgacgctggtgattggcgttcacgcggcgctgctggcctttggagagtttatttttactcaatcgtactgactcctggtcgcccctgatgggcaaaacatctatgatacacgcaattgtggatcaatatagtcactgtgaatgggtggaaaatagcatgagtgccaatgaaaacaacctgatttggatcgatcttgagatgaccggtctggatcccgagcgcgatcgcattattgagattgccacgctggtgaccgatgccaatctgaatattctggcagaagggccgaccattgcagtacatcagtccgatgaacagctggcgctgatggatgactggaacgtgcgcacccataccgccagcgggctggtagagcgcgtgaaagcgagcacgatgggcgatcgggaagctgaactggcaacgctcgaattcttaaaacagtgggtgcctgcgggaaaatcgccgatttgcggtaacagcatcggacaggaccgtcgtttcctgtttaaatacatgccggagctggaagcctacttccactaccgttatctcgatgtcagcaccctgaaagagctggcgcgccgctggaagccggaaattctggatggttttaccaagcaggggacgcatcaggcaatggatgatatccgtgaatcggtggcggagctggcttactaccgcgagcattttatcaagctgtaaaatttttcctggtcacgtaagcgccggaatccacttgcggcggcgtgattttgacgctaaattgaacgtcttgctgataatttcagcacttgagataaaaacgcaaaaaaaacttttttggggggttgcagagggaaagatttctcgtataatgcgcctcccgtaacgacgcagaaatgcgaaaattacgaaagcaaaattaagtagtacgcgggaatagctcagttggtagagcacgaccttgccaaggtcggggtcgcgagttcgagtctcgtttcccgctccaaaatttgaaaagtgctgcaaagcacagaccacccaatcgcagtatttcgaattgcgacaaggcggcaactgaacgaatccttgggaacttacaaaagtatgtgactaaggtgagtgaaggcagccaaggcagtagcggttcgaaagacgaagattaagcgggaatagctcagttggtagagcacgaccttgccaaggtcggggtcgcgagttcgagtctcgtttcccgctccaaaatttgaaagtgctgtaaggcacagaccacccaagcgggaatagctcagttggtagagcacgaccttgccaaggtcggggtcgcgagttcgagtctcgtttcccgctccaaattcttctctcaataaaatatccacagcgacgcgatgcgttattgctggtttttgttgtctctgacaaactcttgtaaacagagttatccacatcctcaggctgtaatcttaatttcaaagaaacttcgcacggtgaatggtatttttttaacctattgataaataagttaaaaatcaagattctgttttgtcgagtcgatcacttgacgattttatgcgtcttgaattgcaatgcgtttttatttttattcacaagctgtggatgaatcaggcgtcacgcggtaaccctttttcaatcacccgaaccagacgctgttttttcggcaattgcacttcgactatgcacgcatttcgtctctcgatttgctgcgcaatcgcccacgctatgtgctcatcaagaagtgggtgctcacctttgcgactctccagcgccgccagaatcgtttcatcccagggcgcattgcctaatgccacggcgatattacgcagccagcgcaggtgacctatacggcgaatcgccgatccttccgtgacttttaaaaacttctcttcgctccaggcaaataactcaatgagttcctgtgcgtgtagcggcttacgcgggctgaaatcgtcttctgtagtgagttgcgaatagcgattccacgggcagataagctggcagtcatcgcaaccgtaaatacggtttcccattaacggtcgcaactcttccgggatcgccccttcaagttcgatggtgagataagagatacagcggcgagcatcgacggtatatggctcgacgatggcaccggtcgggcaaatcgtcatacaggctatgcatttaccgcatccttcctcgactggttgatccacgggcagcggaatatcgaccagcaattcgcctaaaaagaagaaagaaccggcctcgcgattgaggataagtgagtgcttacctgtccagccgagcccagctttttcagctaacgggcgctcgagaataggcgcagaatcgacaaacggtctaaaattcagcgaaacacaatgttgctgaatcatctcgcccagctttttgagtcggttgcgcagaagtttgtgatagtcacggcccagcgcataacggctaacatagccgagtttggggtttttcagcgtgctggcaaatgcggcgttagcaggaaggtaattcatccgcacgctgattacacgcagcgtacctggtaataactcatgggggcgagcgcgcagcataccgtgacgtgccatccagtccatttcgccgtggtattgtttgtccagccatgcttgcagtttgggctcggactcgctgagatcggtatcggtaatacctacctgctgaaagcccagttccagcccccactgtttaattttttgcgctaactgattgagatcgaggggctctgacatgacggaccatacaatgaagaaaaaccccgtaagtataccacacaccgtctggtacgccgacgatatccgccgcggagaacgcgaggcggcagatgtgctggggctcacactctatgagctgatgcttcgcgctggcgaggccgcattccaggtgtgtcgttcggcgtatcctgacgcccgccactggctggtgctgtgcggtcatggtaataacggcggcgatggctacgtggtcgcgcgactggccaaagcggtcggcattgaggtcacgttgttggcccaggagagcgacaaaccgttgccggaagaggccgcgctggcacgcgaagcatggttaaacgcgggtggcgagatccatgcttcgaatattgtctggcccgaatcggtagatctgattgttgatgcgctgctcggtaccggcttgcagcaagcgccccgcgaatccattagccagttaatcgaccacgctaattcccatcctgcgccgattgtggcggttgatatcccttccggcctgctggctgaaaccggcgctacgccaggcgcagtgatcaacgccgatcacaccatcacttttattgcgctgaaaccaggcttgctcactggaaaagcgcgggatgttacaggacaactgcattttgactcactggggctggatagctggctggcaggtcaggagacgaaaattcagcggttttcggcagaacaactttctcactggctgaaaccgcgtcgcccgacttcgcataaaggcgatcacgggcggctggtgattatcggtggcgatcacggcacggcgggggctattcgtatgacgggggaagcggcgctgcgtgctggtgctggtttagtccgagtactgacccgcagtgaaaacattgcgccgctgctgactgcacgaccggaattgatggtgcatgaactgacgatggactctcttaccgaaagcctggaatgggccgatgtggtggtgattggtcccggtctgggccagcaagagtgggggaaaaaagcactgcaaaaagttgagaattttcgcaaaccgatgttgtgggatgccgatgcattgaacctgctggcaatcaatcccgataagcgtcacaatcgcgtgatcacgccgcatcctggcgaggccgcacggttgttaggctgttccgtcgctgaaattgaaagtgaccgcttacattgcgccaaacgtctggtacaacgttatggcggcgtagcggtgctgaaaggtgccggaaccgtggtcgccgcccatcctgacgctttaggcattattgatgccggaaatgcaggcatggcgagcggcggcatgggcgatgtgctctctggtattattggcgcattgcttgggcaaaaactgtcgccgtatgatgccgcctgtgcgggctgtgtcgcgcacggtgcggcagctgacgtactggcggcgcgttttggaacgcgcgggatgctggcaaccgatctcttttccacgctacagcgtattgttaacccggaagtgactgataaaaaccatgatgaatcgagtaattccgctccctgatgagcaggcaacattagacctgggcgagcgggtagcgaaagcctgcgatggcgcaaccgtaatctatctgtatggcgatttaggcgcaggtaaaaccacctttagccggggttttttacaagctctgggtcatcagggtaatgtcaaaagccccacttatacgctggtcgaaccctatacgctcgacaatttaatggtttatcactttgatttgtaccgccttgccgatcccgaggagctggagtttatggggatccgcgattattttgccaacgatgccatctgcctggtggagtggccacaacaaggtacaggtgttcttcctgacccggatgtcgaaatacacattgattatcaggcacaaggccgtgaggcgcgcgtgagtgcggtttcctctgcgggtgaattgttgctggcgcgtttagccggttaacctttgaaaggtggcgggatgatgtatcgcatcagaaattggttggtagcgacgctgctgctgctgtgcacgccggtgggtgccgcgacgctctctgatattcaggtttctaacggtaatcaacaggcgcggataacgttgagttttattggcgatcctgattatgcgtttagccatcaaagcaaacgcaccgtggcgctcgatatcaaacaaacgggcgtgattcagggactgccgttgttgttcagcggcaataatctggtgaaggcgattcgctctggaacgcctaaagatgcacaaacgctacggctggtggtcgatcttaccgaaaacggtaaaaccgaagcggtgaagcggcagaatggcagcaattacactgtcgtctttacgattaacgccgatgtgccgccaccgcctcctccaccgcccgtggttgcgaaacgcgttgaaacgcctgcggttgtcgcaccgcgcgtcagcgaaccggcgcgcaatccgtttaaaacggaaagtaaccgcactacgggtgttatcagcagtaatacggtaacgcgtccggcagcgcgcgcgacggctaacactggcgataaaattatcatcgctattgatgccggacacggcggtcaggaccctggcgctatcggccccggtggtacgcgggagaaaaatgtcaccatcgccatcgcgcgtaaattgcgcactttgctcaatgacgatccgatgtttaaaggcgttttaacccgtgacggggattactttatctcggtgatggggcgcagcgatgtggcacgtaagcaaaacgccaatttcctcgtgtcgattcacgctgatgccgcaccgaaccgcagtgcgactggcgcttccgtatgggtgctctctaaccgtcgcgccaacagcgaaatggccagctggctggagcagcacgagaaacagtcggagctgctgggtggggcgggcgatgtgctggcgaacagtcagtctgacccctatttaagccaggcggtgctggatttacagttcggtcattcccagcgggtagggtatgatgtagcgaccagtatgatcagtcagttgcaacgcattggcgaaatacataaacgccgaccagaacacgcgagtctcggcgttctgcgttcgccggatatcccgtcagtactggtcgaaaccggttttatcagcaacaacagcgaagaacgtttgctggcgagcgacgattaccaacaacagctggcagaagccatttacaaaggcctgcgcaattatttccttgcgcatccgatgcaatctgcgccgcagggggcaacggcacaaactgccagtacggtgacgacgccagatcgcacgctgccaaactaaggacgattgatgccaattcaggtcttaccgccacaactggcgaaccagattgccgcaggtgaggtggtcgagcgacctgcgtcggtagtcaaagaactggtggaaaacagcctcgatgcaggtgcgacgcgtatcgatattgatatcgaacgcggtggggcgaaacttatccgcattcgtgataacggctgcggtatcaaaaaagatgagctggcgctggcgctggctcgtcatgccaccagtaaaatcgcctctctggacgatctcgaagccattatcagcctgggctttcgcggtgaggcgctggcgagtatcagttcggtttcccgcctgacgctcacttcacgcaccgcagaacagcaggaagcctggcaggcctatgccgaagggcgcgatatgaacgtgacggtaaaaccggcggcgcatcctgtggggacgacgctggaggtgctggatctgttctacaacaccccggcgcggcgcaaattcctgcgcaccgagaaaaccgaatttaaccacattgatgagatcatccgccgcattgcgctggcgcgtttcgacgtcacgatcaacctgtcgcataacggtaaaattgtgcgtcagtaccgcgcagtgccggaaggcgggcaaaaagaacggcgcttaggcgcgatttgcggcaccgcttttcttgaacaagcgctggcgattgaatggcaacacggcgatctcacgctacgcggctgggtggccgatccaaatcacaccacgcccgcactggcagaaattcagtattgctacgtgaacggtcgcatgatgcgcgatcgcctgatcaatcacgcgatccgccaggcctgcgaagacaaactgggggccgatcagcaaccggcatttgtgctgtatctggagatcgatccgcatcaggtggacgtcaacgtgcaccccgccaaacacgaagtgcgtttccatcagtcgcgtctggtgcatgattttatctatcagggcgtgctgagcgtgctacaacagcaactggaaacgccgctaccgctggacgatgaaccccaacctgcaccgcgttccattccggaaaaccgcgtggcggcggggcgcaatcactttgcagaaccggcagctcgtgagccggtagctccgcgctacactcctgcgccagcatcaggcagtcgtccggctgccccctggccgaatgcgcagccaggctaccagaaacagcaaggtgaagtgtatcgccagcttttgcaaacgcccgcgccgatgcaaaaattaaaagcgccggaaccgcaggaacctgcacttgcggcgaacagtcagagttttggtcgggtactgactatcgtccattccgactgtgcgttgctggagcgcgacggcaacatttcacttttagccttgccagtggcagaacgttggctgcgtcaggtacaactgacgccgggtgaagcgccagtttgcgctcagccgctgcttattccgttgcggctaaaagtttctggcgaagaaaaatcggcattagaaaaagcgcagtctgccctggcggaattgggtattgatttccagtcagatgcacagcatgtgaccatcagggccgtgcctttacccttacgccaacaaaatttacaaatcttgattcctgaactgataggctacctggcgaagcagtccgtattcgaacctggcaatattgcgcagtggattgcacgaaatctgatgagcgaacatgcgcagtggtcaatggcacaggccataaccctgctggcggacgtggaacggttatgtccgcaacttgtgaaaacgccgccgggtggtctgttacaatctgttgatttacatccggcgataaaagccctgaaagatgagtgatatcagtaaggcgagcctgcctaaggcgatttttttgatggggccgacggcctccggtaaaacggcgttagccattgagctgcgtaaaattttaccagtagagttgataagcgttgattctgcccttatttacaaagggatggatatcgggacggcgaagccgaacgctgaagagttactcgccgcgccgcaccgattgctggatattcgcgatccgtcgcaggcttactcggctgctgattttcgccgcgatgcgctggcggaaatggccgatatcaccgcggcggggcggatcccactgttagtgggcggtacgatgttgtatttcaaggcattgctggaagggttgtcgccgctaccgtcggcagacccggaagtgcgggccagaattgagcaacaggcggcagagcaaggttgggagtcattgcatcgtcaacttcaggaggtagatccggttgcggcagcaaggattcatccaaatgatccacaaaggctttcccgggcactggaagtttttttcatttcgggtaaaactttaacggaactgacgcaaacgtcaggagacgctctaccgtatcaggtgcatcagttcgccatcgccccggcgagccgtgaactgctccatcaacgcattgagcagcgttttcatcagatgttggcttcaggttttgaagcagaagtccgggcgctttttgcccgaggagatttgcatacggacttgccttccattcgttgcgtgggttatcgccagatgtggtcttaccttgaaggcgaaatctcatacgatgaaatggtttatcgaggtgtttgcgccacgagacagttggcgaagcggcagataacctggctgcgtggttgggaaggggttcactggcttgacagtgaaaaaccagaacaggcgcgtgacgaagtattacaggttgttggtgctatcgcaggctgaatgtgtacaattgagacgtatcgtgcgcaattttttcagaatcgaaaggttcaaagtacaaataagcatataaggaaaagagagaatggctaaggggcaatctttacaagatccgttcctgaacgcactgcgtcgggaacgtgttccagtttctatttatttggtgaatggtattaagctgcaagggcaaatcgagtcttttgatcagttcgtgatcctgttgaaaaacacggtcagccagatggtttacaagcacgcgatttctactgttgtcccgtctcgcccggtttctcatcacagtaacaacgccggtggcggtaccagcagtaactaccatcatggtagcagcgcgcagaatacttccgcgcaacaggacagcgaagaaaccgaataaggtttcgggctgttttttttacacggggagccagcgatcctgcgttccccgctgatctatttagagggttatacgcttgtttgaccgttatgatgctggtgagcaggcggtactggtacacatctattttacgcaagacaaagatatggaagacctccaggagtttgaatctctggtctcttccgccggtgtcgaagcattgcaggtgattaccggtagccgtaaagcgccgcacccaaagtattttgtaggtgaaggtaaagcagttgaaattgcggaagctgtcaaagcgacgggtgcttcggtcgttctttttgaccatgccctgagcccggcgcaagagcgtaacctggagcgtttgtgcgagtgtcgtgttatcgaccgcaccggccttattttagatattttcgcccaacgtgcgcgtacccatgagggtaagttgcaggttgagctggcgcagctgcgccatctggctacgcgcctggtgcgtggctggacccaccttgaaagacagaaaggcgggataggtttgcgtggtccgggtgaaacccagctcgaaaccgaccgtcgtttgttgcgtaatcgcatcgtgcagatacagtcgcgcctagaaagagttgaaaagcagcgtgagcaggggcggcaatcgcgtatcaaagccgacgttcctactgtttcgctggtgggatataccaacgccggtaaatctacccttttcaatcgcatcaccgaagcgcgggtctacgcggcagaccagttgtttgccaccctcgacccgacgttgcggcgtattgacgtcgcggatgtcggtgaaaccgtacttgcagataccgtagggtttattcgccacctgccgcacgatctggtggcagcatttaaagccacgttacaagagacgcggcaagccacattactgctgcacgtcattgatgcggcggatgtacgtgtacaagaaaacatcgaagcggtgaatacggttcttgaagagatcgacgctcacgagatcccaaccctgctggtgatgaacaagatcgatatgctggaagatttcgaaccgcgtattgatcgggacgaagagaacaaaccgatccgtgtctggctttccgcacagaccggagcggggataccacagctttttcaggctttgacggagcggctttccggcgaggtggcgcagcatacattgcgtttgccgccgcaggaaggacgtctgagaagtcgtttttatcagcttcaggcaatagaaaaagagtggatggaggaggacggcagcgtaagtctgcaagttcgtatgccgatcgttgactggcgtcgcctctgtaaacaagaaccggcgttgatcgattacctgatctaacggcgtagcgtctgaagcgtggagtcatatcctctggcgtcgaaagacaacagggatcaccgcataacaaatatggagcacaaacatggcgtggaatcagcccggtaataacggacaagaccgcgacccgtggggaagcagcaaacctggcggcaactctgagggaaatggaaacaaaggcggtcgcgatcaagggccacctgatttagatgatatcttccgcaaactgagcaaaaagctcggtggtctgggcggcggtaaaggcaccggatctggcggtggcagttcatcgcaaggcccgcgcccgcagcttggcggtcgtgtcgttaccatcgcagcggcagcgattgtcattatctgggcggccagtggtttctataccattaaagaagccgaacgcggcgtggtaacacgctttggtaaattcagccatctggttgagccgggtctgaactggaaaccgacgtttatcgacgaagtcaaaccggtgaacgtggaagccgtgcgtgaactggccgcttctggtgtgatgctgacgtcggacgagaacgtagtgcgcgttgagatgaacgtgcagtaccgcgtcaccaatccggaaaaatatctgtatagcgtgaccagcccggatgacagcctgcgtcaggctaccgacagcgccctgcgtggagttatcggtaaatacaccatggaccgcattctgacggaaggtcgtaccgtgattcgtagcgatactcagcgcgaactggaagagactatccgtccgtatgacatgggtatcactctgctggacgtcaacttccaggcagctcgtccgccggaagaagtaaaagcggcgtttgacgatgcgattgccgcgcgtgaaaacgaacagcaatacattcgtgaagcagaagcgtataccaacgaagttcagccgcgtgcgaacggtcaggcgcaacgtatcctcgaagaggcgcgtgcgtacaaggcccagaccatcctggaagctcagggtgaagtggcgcgctttgctaaacttctgccggaatataaagccgcgccggaaattactcgcgagcgtctgtatatcgagacgatggaaaaagtgttgggtaacacccgcaaagtgctggttaacgataaaggtggcaacctgatggttctgccgttagaccagatgctgaaaggcggtaacgcccctgcggcgaagagcgataacggtgccagcaatctgctgcgtctgccgccagcctcttcctccacaaccagtggagcaagcaacacgtcgtccaccagtcagggcgatattatggaccaacgccgcgccaacgcgcagcgtaacgactaccagcgtcagggggaataacgatgcgtaagtcagttatcgcgattatcatcatcgtgctggtagtgctttacatgtctgtctttgtcgtcaaagaaggtgagcgcggtattacgctgcgttttggtaaggtactgcgtgacgatgacaacaaacctctggtttatgagccgggtctgcatttcaagataccgttcattgaaacggtgaaaatgctcgacgcacgtattcagaccatggacaaccaggccgaccgctttgtgaccaaagagaagaaagacctgatcgtcgattcttacatcaaatggcgcatcagcgatttcagccgttactacctggcaacgggtggtggcgacatttcgcaagcggaagtgctgttgaaacgtaagttctctgaccgtctgcgttctgaaattggtcgcctggacgtgaaagacatcgtcaccgattcccgtggtcgtctgaccctcgaagtacgtgacgcgctgaactccggttctgcgggtacagaagatgaagttactaccccggcggcagataacgccattgccgaagcggcagagcgcgtaacggctgagacgaagggcaaagttccggtcatcaacccgaacagtatggcggcgctgggtattgaagttgtcgatgtgcgtatcaagcagatcaacctgccgaccgaagtgtctgaagcgatctacaaccgtatgcgcgccgagcgtgaagcggtagcgcgtcgtcaccgttcacaaggtcaggaagaagcggaaaaactgcgcgcgactgccgactatgaagtgaccagaacgctggcagaagctgagcgtcagggccgcatcatgcgtggtgaaggcgatgccgaagcagccaaactgtttgctgatgcattcagtaaagatccggacttctacgcattcatccgtagcctgcgtgcttatgagaacagcttctctggcaatcaggacgtgatggtcatgagcccggatagcgatttcttccgctacatgaagacgccgacttccgcaacgcgttaatataacgactgcggtacaggtcaataaagccaccgcatcctcagggatgtcggtggttttctttttctataaggataatgaatgaattcgacaatctggctggcgcttgccctggttttggtactggaaggtttagggccgatgctttacccgaaggcatggaagaagatgatctctgcgatgaccaatttgcccgataatattttacgtcgttttggcggtggacttgtggttgcgggcgttgtggtctactacatgttgaggaaaacgattggctgaacaaaaaacagactgatcgaggtcatttttgagtgcaaaaagtgctgtaactctgaaaaagcgatggtagaatccatttttaagcaaacggtgattttgaaaaatgggtaacaacgtcgtcgtactgggcacccaatggggtgacgaaggtaaaggtaagatcgtcgatcttctgactgaacgggctaaatatgttgtacgctaccagggcggtcacaacgcaggccatactctcgtaatcaacggtgaaaaaaccgttctccatcttattccatcaggtattctccgcgagaatgtaaccagcatcatcggtaacggtgttgtgctgtctccggccgcgctgatgaaagagatgaaagaactggaagaccgtggcatccccgttcgtgagcgtctgctgctgtctgaagcatgtccgctgatccttgattatcacgttgcgctggataacgcgcgtgagaaagcgcgtggcgcgaaagcgatcggcaccaccggtcgtggtatcgggcctgcttatgaagataaagtagcacgtcgcggtctgcgtgttggcgaccttttcgacaaagaaaccttcgctgaaaaactgaaagaagtgatggaatatcacaacttccagttggttaactactacaaagctgaagcggttgattaccagaaagttctggatgatacgatggctgttgccgacatcctgacttctatggtggttgacgtttctgacctgctcgaccaggcgcgtcagcgtggcgatttcgtcatgtttgaaggtgcgcagggtacgctgctggatatcgaccacggtacttatccgtacgtaacttcttccaacaccactgctggtggcgtggcgaccggttccggcctgggcccgcgttatgttgattatgttctgggtatcctcaaagcttactcaactcgtgtaggtgcaggtccgttcccgaccgaactgtttgatgaaactggcgagttcctctgcaagcagggtaacgaattcggcgcaactacgggtcgtcgtcgtcgtaccggctggctggacaccgttgccgttcgtcgtgcggtacagctgaactccctgtctggcttctgcctgaccaagctggacgttctggatggcctgaaagaggttaaactctgcgtggcttaccgtatgccggatggtcgcgaagtggctaccactccgctggcagctgacgactggaaaggtgtagagccgatttacgaaaccatgccgggctggtctgaatccactttcggcgtgaaagatcgtagcggcctgccgcaggcggcgctgaactacatcaagcgtattgaagagctgaccggtgtgccgatcgatatcatctctaccggtccggatcgtactgaaaccatgattctgcgcgatccgttcgacgcgtaattctggtacgcctggcagatattttgcctgccgggctaacagtgtgatacattgctgtgtcggttaagccattacgctatccgacacagtgttaaatcctcgcttttttccttccccgaactgaaataaattagcgacacagcttgtggctggtttatcatcaatataaatgtattttttcccgatttcccttttgaggttgatgtgcagttaacgagtttcactgattacggattacgtgcgctgatctacatggcgtcattgccagaagggcggatgaccagtatttctgaagtgactgacgtctacggcgtctcccgtaatcatatggtcaaaataatcaatcaacttagtcgtgccggctacgtgactgctgttcgtggaaaaaatggcggcattcgcctgggtaaaccggcgagtgcgatacgtattggtgatgtggtgcgcgagctggagcccttatcgctggtgaattgcagcagtgagttttgccacattacacctgcctgtcggttgaaacaggcgctttctaaggccgtgcaaagttttcttacggaactggataactacacgcttgccgatttggttgaagagaatcaaccgctttataaattattgctggtggagtgacgaaaatcttcatcagagatgacaacggaggaaccgagatgtcacaagatcctttccaggaacgcgaagctgaaaaatacgcgaatcccatccctagtcgggaatttatcctcgaacatttaaccaaacgtgaaaaaccggccagccgtgatgagctggcggtagaactgcacattgaaggcgaagagcagcttgaaggcctgcgtcgccgcctgcgcgcgatggagcgcgatggtcaactggtcttcactcgtcgtcagtgctatgcgctgccggaacgcctcgacctggtgaaaggtaccgttattggccaccgtgatggctacggctttctgcgggttgaagggcgtaaagatgatttgtatctctccagcgagcagatgaaaacctgtattcatggcgatcaggtgctggcgcagccgctgggtgctgaccgtaaaggtcgtcgtgaagcgcgtattgtccgcgtactggtgccaaaaaccagccagattgttggtcgctactttaccgaagcgggcgtcggctttgtggttcctgacgatagccgtctgagcttcgatatcttaatcccgcccgatcagatcatgggcgcgcggatgggctttgtggtcgtagtcgaactgactcagcgtccgactcgccgcaccaaagcggtgggtaaaatcgtcgaagtgctgggcgacaatatgggcaccggcatggcggttgatatcgctctgcgtacccatgaaattccgtatatctggccgcaggctgttgagcaacaggttgcggggctgaaagaagaagtgccggaagaagcaaaagcgggccgtgtcgatttgcgcgatttaccgctggtcaccattgatggcgaagacgcccgtgactttgacgatgcagtttactgcgagaaaaaacgcggcggcggctggcgtttatgggtcgcgattgccgacgtcagctactatgtgcgtccgccaacgccgctggacagagaagcgcgtaaccgtggcacgtcggtgtacttcccttcgcaggttatcccgatgctgccggaagtgctctctaacggcctgtgttcgctcaacccgcaggtagaccgcctgtgtatggtgtgcgagatgacggtttcgtcgaaaggccgcctgacgggctacaaattctacgaagcggtgatgagctctcacgcgcgtctgacctacaccaaagtctggcatattctgcagggcgatcaggatctgcgcgagcagtacgccccgctggttaagcatctcgaagagttgcataacctctataaagtgctggataaagcccgtgaagaacgcggtgggatctcatttgagagcgaagaagcgaagttcattttcaacgctgaacgccgtattgaacgtatcgaacagacccagcgtaacgacgcgcacaaattaattgaagagtgcatgattctggcgaatatctcggcggcgcgtttcgttgagaaagcgaaagaaccggcactgttccgtattcacgacaagccgagcaccgaagcgattacctctttccgttcagtgctggcggagctggggctggagctgccgggtggtaacaagccggaaccgcgtgactacgcggaactgctggagtcggttgccgaccgtcctgatgcagaaatgctgcaaaccatgctgctgcgctcgatgaaacaggcgatttacgatccagaaaaccgtggtcactttggcctggcattgcagtcctatgcgcactttacttcgccgattcgtcgttatcctgacctgacgctgcaccgcgccattaagtatctgctggcgaaagagcaggggcatcagggcaacaccactgaaaccggcggctaccattattcgatggaagagatgttgcaactgggtcagcactgttcgatggcggaacgtcgtgccgacgaagcaacgcgcgatgtcgctgactggctgaagtgtgacttcatgctcgaccaggtaggtaacgtctttaaaggcgtaatttccagcgtcactggctttggcttcttcgtccgtctggacgacttgttcattgatggtctggtccatgtctcttcgctggacaatgactactatcgctttgaccaggtagggcaacgcctgatgggggaatccagcggccagacttatcgcctgggcgatcgcgtggaagttcgcgtcgaagcggttaatatggacgagcgcaaaatcgactttagtctgatctccagtgaacgcgcaccgcgcaacgtcggtaaaacggcgcgcgagaaagcgaaaaaaggcgatgcaggcaaaaaaggcggcaagcgtcgtcaggtcggtaaaaaggtaaactttgagccagacagcgccttccgcggtgagaaaaaaacgaagccgaaagcggcgaagaaagacgcgagaaaagcgaaaaagccatcggcgaaaacgcagaaaatagccgcagcgaccaaagcgaagcgtgcggcgaagaaaaaagtggcagagtgatcaataccctctttaaaagaagagggttagattgctgacaaaatgcgctttgttcatgccggatgcggcgtgaacgccttatccggcctacataatcacgcaaattcaatatattgcagagatcatgtaggccggataaacgtagtgcatcaggcaaaacgtaaacaacgagtacattaatgagcgaaatgatttacggcatccacgcagtgcaggccctgctggagcgcgcccctgaacgttttcaggaagtctttattttaaaaggccgtgaagataaacgtctgttaccgctgattcacgcccttgagtctcagggcgtggttatccagttggcaaaccgccaatatctcgacgagaaaagcgacggtgccgtgcatcagggcattatcgcccgcgtgaagccaggacgtcagtatcaggaaaacgatctgccggatctgatcgcttcgctcgatcaaccgttcctgctgatcctcgacggtgtaaccgatccgcacaacctcggcgcgtgcctgcgtagcgcggacgctgctggcgttcacgcggtgattgtgccgaaagatcgctccgcacagctcaacgctacggcgaaaaaagtagcctgcggcgcggcagaaagcgttccactgattcgggtgactaaccttgcgcgcaccatgcgtatgttgcaggaagagaatatctggatcgtcggtacggcaggcgaggcggatcatacactctatcagagcaaaatgaccggacgcttggcgctggtgatgggcgcggaaggtgaaggtatgcgtcgcctgacccgtgaacattgcgatgagttgatcagcatcccaatggcaggaagtgtttcttccctgaacgtttcggttgcaaccggaatttgcttatttgaagcggttcgtcagcgcagctagttcgtctgaattatgaaaagccatccagatttggatggtttttttgtctatagctggtaagataattacggtgatgctgccaacttactgatttagtgtatgatggtgtttttgaggtgctccagtggcttctgtttctatcagctgtccctcctgttcagctactgacggggtggtgcgtaacggcaaaagcactgccggacatcagcgctatctctgctctcactgccgtaaaacatggcaactgcagttcacttacaccgcttctcaacccggtacgcaccagaaaatcattgatatggccatgaatggcgttggatgccgggcaactgcacgcattatgggcgttggcctcaacacgattttacgtcacttaaaaaactcaggccgcagtcggtaacctcgcgcatacagccgggcagtgacgtcatcgtctgcgcggaaatggacgaacagtggggctatgtcggggctaaatcgcgccagcgctggctgttttacgcgtatgacagtctccggaagacggttgttgcgcacgtattcggtgaacgcactatggcgacgctggggcgtcttatgagcctgctgtcaccctttgacgtggtgatatggatgacggatggctggccgctgtatgaatcccgcctgaagggaaagctgcacgtaatcagcaagcgatatacgcagcgaattgagcggcataacctgaatctgaggcagcacctggcacggctgggacggaagtcgctgtcgttctcaaaatcggtggagctgcatgacaaagtcatcgggcattatctgaacataaaacactatcaataagttggagtcattaccgcattggtagaccgaataatccttttgaaccgcgtcgcaatcgctacgcacaaaaatacttaacgttggcgctaatgggcggtgccgcttttttcgtattgaaaggttgtggcgatagtagcgatgtcgataacgacggcgacggaacgttttacgcgacagtgcaggattgtattgatgacggtaataatgccgacatttgcgcgcgtggctggaacaacgccaaaacggcattttatgccgatgttccgaagaatatgactcagcagaactgtcagtctaagtacgaaaattgctactacgacaatgttgaacagagttggatcccggtcgtttctggatttttgttaagccgggttattcgtaaagatcgcgatgagccgttcgtctataacagcggcggatcctcatttgcttcccgccccgtctggcgcaacacttccggtgattactcctggcgctccggttctggcaaaaaagagtcttactcttcaggcggctttaccaccaaaaaagcgtcaaccgtttcgcgcggcggctatggtcgttcttccagcgcccgtgggcattggggaggctaatcatgctgagacacaacgttcctgtgcggcgggatctggaccaaattgccgctgacaacggtttcgactttcatatcatcgacaatgaaatctattgggacgagagtcgggcttaccgttttactctgcgccagattgaagagcagatcgaaaaaccaactgcggaactgcatcagatgtgccttgaggtggtggatcgcgcggttaaagacgaagagatcctgacgcaactggcgatcccgccgttgtactgggatgtgatcgccgaaagctggcacgccagcgatccttcgctgtatggccggatggattttgcctggtgtggcaatgcgccggtgaagctgctggagtacaacgccgatacgccgacttcgttgtatgagtcggcttatttccagtggttgtggctggaggatgcccggcgcagcggcattattccgcgtgatgccgatcagtacaatgccattcaggaacgcctgatttcacgctttagcgagctttatagccgggagccgttttatttctgctgctgtcaggacaccgatgaagacaggactaccgtgctgtacttgcaggactgcgcccagcaggcagggcaggagtcgcggtttatctacattgaagatctcggtttgggcgtcggcggtgtactgaccgatcttgatgataatgtcatccagcgtgcatttaagctgtatccgctggagtggatgatgcgtgacgataacggtccgctgctgtgcaagcgtcgcgagcaatgggtggagccgttatggaaaagtatcttgagtaataaagggctaatgccgctgctttggcgcttcttccctggtcatcctaaccttcttgcatcctggtttgagggtgaaaaatcgcagattgccgctggcgaaagctatgtgcgtaaaccgatctactcgcgcgaaggcggaaacgtcaccattttcgacggtcagaataacgtcgttgaccacgctgatggtgattacgccgatgaaccgatgatctaccaggcgtttcaacctctgccgcgatttggcgatagctacacactcatcgatagctggattgtcgatgatgaagcgtgcggaatggggatccgtgaagataacacactgatcaccaaagacacctcacgtttcgttccgcattacattgctggataagaatgttttagcaatctctttctgtcatgaatccatggcagtggccatactaatggtgactgccattgatggagggagacacagtgcactggcaaactcacaccgtttttaatcaacctataccattaaataacagcaacttatacctgtctgatggcgcgctttgcgaagcggtaacgcgtgaaggtgctggctgggatagcgattttctagccagtattggtcagcagttaggaacggctgaatcccttgaactggggcggctggcgaatgtaaacccgcctgaactgttgcgctacgatgcccaggggcggcgtctggacgatgttcgtttccatcccgcatggcacctgctgatgcaggtgttatgtaccaatcgggtgcacaatcttgcctgggaagaagacgctcgctccggcgcatttgtggcgcgcgcggcgcgttttatgttacatgcgcaggttgaggctgggtcgttatgtccaataacgatgacctttgccgccacgccattgttgttacagatgttacccacgccgtttcaggactggaccacgccgctgctgagcgatcgctacgattctcacttattgccaggtgggcaaaaacgcggtttgttgattggcatgggaatgacggaaaagcagggtggttccgatgtcatgagcaacaccacccgtgcagagcgtttggaagatggctcttatcggctggtggggcataaatggtttttctcggttccgcaaagcgatgcgcatctggtgctggcgcagaccacgggcggtctgtcctgtttttttgtgccgcgctttttgcctgacgggcaacgcaacgcgattcgcctcgaacggctgaaagataagctgggtaatcgctctaacgccagttgtgaagtggagtttcaggatgccattggctggttattggggcaggaaggggaaggaattcgtctgatcctgaaaatgggggggatgacgcgttttgattgcgccctgggtagccatgccatgatgcgccgtgcgttttcgctggcgatttatcatgcacatcaacgccatgtttttggtaatccattgatccaacagccccttatgcgtcatgtcttaagtcgcatggcacttcagcttgaagggcaaacggcgttgctgtttcgtcttgcgcgagcgtgggaccggcgcgccgatgccaaagaagccctgtgggcgcgtttatttacgcctgcggcaaaatttgtgatctgcaaacgaggtatgccgtttgtggccgaagcgatggaggtgctgggcggcattggttattgcgaggagagcgagctgccgcggctttaccgggagatgccggtaaacagtatttgggaaggttccggcaatattatgtgcctggatgtgttgcgcgttctcaataagcaagcgggcgtatacgacttattgtcggaagcatttgtggaagtgaaagggcaggatcgctattttgatcgcgcggttcgtcgtttacagcagcagctgcgtaagccagctgaagaactggggcgagagattactcatcagctattcctgctgggctgcggtgcgcaaatgttgaaatatgcttctccgccaatgtcgcaggcgtggtgtcaggtgatgttagatacgcgcggcggcgtacggttgtcagagcagatccagaatgatttattgctgcgggcgacggggggagtgtgtttgtaaacgtatacgactgatgcgacgctggtttcgattaactcaatgaaatatgtgaaaattgtaggccggacaaggcgctcgcgccgcatccggcattgttcatttgctgtagatgacactcatgcatacagtatcgcctgtacgcgccagttatcaggctgctggtcttcgtacatggtaataatgcggtaccatgacgcaccttgttcatcggcctttaacgccacgatacgttccacgtcctgcggatcccctgaaatattgctaactgagatctgacctatttcattcaggcccgtcacgcagtcagcactggcgaattctgcagactgtgccgtggcgctcgcaggataagtcactaattgcagcgagggtgaggcaagtaattgtttcatcgtcagctccatttttcgtttccccacatgttgcagggcattccatcgcggtaataaacgcccaggcttccagccggtaatttattgtgcacaggtaaacgcatagggacgcaaagcaatgtaaagctgactatgtaagttgtctgatttatttacggtacaaaatggcttgtgaataccactgtcctgtcacgatggtttcgtccaccatgacgacaacgtaataatcagcttttgcagcgacagcttttgctctgatttctgctaatgcgtcatccggagaaccccgaaccatcgtgcttacgctacctattcgctgtaacccttgcgtctggtcgcggcgaatctcttgcggatggtccgttactggcggtgctggctgtggcgtaccttgcagtgcgctacaggcacttaacatcaacaccaataataaactggcaaaccggtaaataacgctattacgtttcctgctaaccatagtgtagtgccttattaatttaactttgggggaatgttcccgaattgttacctggtacgcgattttcgaatgaaaacgtgacgaaagcgtaacccacatctcaacattatgaactaataccgccagcagaaacttgtgctaaggatttcttcatgtcataccagacaaaaaggagagacagatgattgaaatagaatcacgcgagctggcagatattcccgttcttcatgcttatcctgtcgggcaaaaagataccccgttaccgtgcgtaattttttatcacggctttacttcatccagcctggtgtatagctattttgccgttgcgctggcgcaggctggtttgcgggtgatcatgccggatgcgcccgatcacggtagccgttttagtggcgacgaagcgcggcggttaaatcaattctggcaaatcttgctacaaagtatgcaggaattcactactttacgtgcggcaatagccgaagaaaactggctgcttgatgaccgtctggcagtcggtggcgcgtcgatgggcgcgatgacggcactgggaattaccgctcgccaccccacggtgaaatgtaccgccagcatgatgggatcgggctattttacatcgctcgcccgttcactgtttccaccgctgatacctgaaacggcagcacagcagaatgaattcaataacattatcgcgccgctggcagagtgggaagcgacaaaccacctggaacaacttggggacagacctctactgctgtggcatggcctcgacgatgacgttgtgcctgccgacgaatcactacgtttgcagcaggccttaagcgagacgggacgggataaactgctaacctgttcatggcagccaggcgtgcgtcaccgcattacgcctgaggcgttagatgctgccgtgacatttttccgccagcatctttaaacacgcagaatgctgaccccttgcgcttccagttgttgcaggatttccgggttagcatttttgccggtgataagcatatcgatttgatcggcacggctaaaaagcattcccgcgcgttcgccaatcttactgctatcaaccagtaccaccagtttccctaccacgctcagcatcttctgctctgccattgctgtcagcatatcggttttatacaacccttctgcggtcagcccttttccgctggtaaacatccagtgcccggcatagagactgttttcgctgccctgcgggcttaaagtgatggactgacttttgttgtactgtccacccataatgatcacgctgtcatgttcttgatcgatcaggtaatttgccagcggtagataattagtgatgatttgcactggcttgccacacatttcccgcccaagcagaaacgcggtggagccgcagttgatgactacgctttcgcccggattaaccagctgcgaggccgctttagcaatacgtactttttcatcgtgattctgcgcctgatgcagattcatcggcgtccagcgcgggcgctgttgggtaatagcttctgcgccattgcgcacctttttcagtttgccgcgttcgtcaagtttattgatatcgcgtcgcgcagtggcaggcgaaattcccagacgctcaacgactttctcaacggtcacaaagcccaattgtgcgagcatttccaggaggatttgatgtctttgtgcttcagtcatgagctattccgataaaatttgatttttttagatgatatttgaaatagctaggaaatactacgccggatagcgcgaacttctccacgctatccggtataaacgacagattacaggaatgacttgaacggcagatccggttcaatagtgaagcaatcatcgaaaccgcgcggatagtggtactcgaagttgtctttatccagcggccaggtaaatttgccgccaacctgccagataaacggcttgaagccatacttcagacgatcttttttcatctcccacagcacgcggatctcttgcggatcggcctggaagtttgaccagatgtcgtggtggaacgggataaccactttcgcattcagggcttcacccatacgcagcatatcggcgctggtcattttgtcggtaataccgcgcgggttctcaccatacgatcctaacgccacatcgatctgatgttcgttaccgtgcttcgcataatagttagagtagtgggaatcgccactgtgatatagggaaccgccaggggttttgaacaggtagtttactgcgcgatcgtccatgccatctggcagtacgccagccgctttttgatcggcaggcagggtgatcagtgcagtacggtcgaaagcgtcaagcgcatgaatttcaatgtctttcacttttacaacatcgcccggtttgaccacgatgcaacgctctttcggtacgccccagccaatccacaaatcaacgcaggttttcggtccaatgaatggtacgtcatcagcacagttctgcatcacggcagcagcgacgttaacgtcgatatgatcgttgtgatcgtgagtcgccagtaccgcgtcgatctggcgaatcgcaaacggatcaagaacaaacggggtggtgcgtaggtttggctgcagttttttcacgccagccatgcgctgcatctggtgaccctgtttcattaacgggttaccgtgactttgtttgccagtgccgcaccagaaatcaacgcaaacgttggtgccaccttctgatttcaaccagatcccggtgcagcctagccaccacatcgcaaatgtgccaggggcgacctgctcttgttcaatttcttcattcagccagctaccccactccgggaaagtgctcaggatccaggattctcgggtgatacttttcactttactcatcgccatttaccttcatgatagttcaattcgaatcaatatgtgattggttttgattaatcctgacactattttttcaggaaggcaatgaccattttttgactttttgccagggaagttgttgttgattttgagtgtggaaagatttaatggaatgtgtagttaaattaactaaatgaatttaaataaataattgtttcgttgtgtgaatcccactctatccgtgtggaattatttgcgggtcgcgtcacatttaatcataaataatcttgttgtgattacttttgaaaattagagtgagtgcacaacattccgggtgtgcggaatacccggttacctcttcttcaggagatcgttatggagatcctctacaacatctttaccgtgttttttaaccaggtcatgaccaatgccccgttgttgctgggtattgtgacctgtctgggctacatcctactgcgcaaaagtgtcagcgttattattaaaggcacgattaaaaccataattggtttcatgttgttgcaggcagggtccggcatcctcaccagcaccttcaaaccggtggtggcgaaaatgtccgaagtctacggcattaaacggcgcaatttccgatacttacgcgtcgatgatggcaaccatcgaccgcatgggcgatgcctatagctgggtaggttacgcggtgttgttagcgctggcgctgaacatctgttacgtgctgctgcgtcgcattaccggtattcgtaccatcatgctgactggtcatatcatgttccagcaggcggggctgattgccgttacgttgtttattttcggctactccatgtggacaaccattatctgcacggcgattctggtttcgctctactggggcattacctccaacatgatgtacaagccgactcaggaagtgacggacggctgcggtttctccatcggtcaccagcaacagtttgcatcatggactgcctataaagttgcgccgttcctcggcaaaaaagaggaaagcgttgaagacctcaaactgccaggctggctgaatattttccacgacaacatcgtctccacggcgattgtcatgaccatcttctttggtgccattctgctctccttcggtatcgacaccgtgcaggcgatggcaggcaaagtgcactggacggtctatatcctgcaaaccggtttttccttcgcggtggcgatcttcatcatcactcagggtgtgcgcatgtttgtggcggaactctctgaagcgtttaacggtatctcccagcgcctgatccctggtgcggttctggcgattgactgtgcggctatttatagcttcgcgccgaacgccgtggtctggggctttatgtggggcaccatcggtcagctgattgcggttggcatcctggtcgcctgcggttcctcgatcctgattatcccaggctttatcccgatgttcttctccaacgccaccatcggcgtgttcgctaaccacttcggcggctggcgtgcggcgctgaagatttgtctggtgatggggatgatcgaaatctttggttgcgtctgggcggtgaaacttaccggtatgagtgcctggatggggatggcggactggtcgattctggcaccgccgatgatgcagggcttcttctccatcggtatcgcctttatggccgtcatcattgtaattgcactggcttatatgttcttcgctggccgcgcactgcgcgcagaagaagatgcagaaaaacaactggcagaacagtctgcttaataaggagttttgattatgaccgtacgtattctggctgtgtgtggcaacggacaaggcagttccatgatcatgaggatgaaagtggaccagtttttaacccaatcaaacattgaccacacggtaaatagctgcgcggttggcgaatacaaaagcgagttgagcggcgcggatatcatcatcgcttctacgcacattgcgggcgaaatcaccgtgaccggcaacaaatacgtggttggcgtgcgcaacatgctctctcctgccgactttggcccgaaactgctggaagtgatcaaagcgcatttcccgcaggatgtgaagtaaggacgcgccatgaaattacgtgattcgctggcggagaataaatccatccgcctgcaggctgaagctgagacatggcaggacgcagtaaaaatcggcgttgacctgctggtggcggatgttgtcgagccgcgttactaccaggcgattctggatgcggttgaacagcacggtccgtactttgtgctcgcaccaggcctggcaatgccgcacggtcgcccggaagagggcgttaagaaaaccggttttgcgctggtgacgctgaaaaagccgctggagttcaaccacgaagataacgacccggtggatatcctcatcaccatggcggcggtcgatgccaacacgcaccaggaagtgggcatcatgcagatcgtcaacctgtttgaagatgaagaaaatttcgaccgtttacgtgcctgccgtaccgagcaggaagtactggatctcattgaccgcaccaacgcggcagcttaagaaggaattgaagatgtcattaccgatgttgcaagtcgcgctggacaaccagactatggatagcgcctacgaaaccactcgcctgattgccgaagaagtcgacattatcgaagtgggtaccattctgtgcgtgggcgaaggcgtgcgtgcggttcgcgatctgaaagcgctctacccgcacaaaatcgtgctggcagacgccaaaattgccgatgcgggcaaaattctttctcgtatgtgcttcgaagccaacgctgactgggtgaccgtgatttgttgtgcggatatcaacaccgccaaaggtgcgctggacgtagcaaaagagtttaacggcgacgtgcagatcgaactgaccggttactggacctgggaacaggcgcaacagtggcgcgacgcaggtattcagcaggtggtttatcaccgcagccgtgacgcgcaggccgctggcgtggcgtggggtgaagccgatatcactgcgatcaaacgtctttccgatatgggcttcaaagtcaccgtcaccggtggcctggcgctggaagatctgccgctgttcaaaggcattccaattcatgtgtttatcgccggtcgcagcatccgtgatgccgcttctccggttgaagccgcgcgtcagttcaaacgttccatcgccgaactgtggggctaaggagcggatatgttgtccaaacaaatcccgcttggcatctatgaaaaagcgctccccgccggggagtgctggctggaacgcctgcgactggcaaaaacgttgggcttcgattttgtcgagatgtcggtagatgaaactgacgagcgcctgtcgcgcctcgactggagccgcgagcagcgtctggcgctggtgaatgcgattgttgaaaccggcgtgcgtgtgccgtccatgtgcctttctgcccatcgtcgtttcccgttgggcagcgaagatgacgcggtgcgggcgcaggggctggagattatgcgtaaagccatccagttcgcccaggacgttggcattcgcgtgatccagctggcgggctatgacgtttactatcaggaagccaataacgaaacgcgtcgtcgtttccgtgacggcctgaaagagagcgttgagatggcgagccgcgcgcaggtgacgctggcgatggagatcatggattatccgttgatgaactccatcagcaaggcgctgggttacgcgcactatctcaacaacccgtggttccagctctacccggatatcggcaacctgtcggcgtgggacaacgatgtgcagatggagttgcaggccggaatcgggcatatcgtcgcggtgcatgtgaaagacaccaaaccgggcgtcttcaaaaacgtgccatttggcgaaggtgtggtggatttcgaacgttgcttcgaaacgctcaaacagagtggctattgcgggccgtacctgattgagatgtggagcgaaacggcggaagacccggcggcagaagtggtgaaagcgcgtgattgggtgaaagcgcgcatggccaaagcaggcacggtggaggcggcataatgcaaaagctaaaacagcaggtgtttgaagccaacatggatctgccgcgctatgggctggtgacctttacctggggcaacgtcagcgctatcgaccgcgaacgcgggctggtggtgatcaagcccagcggcgttgcctacgaaaccatgaaagcagacgatatggtggtggtcgatatgagcggcaaggtggtggaaggggagtatcgcccgtcttccgacaccgcgacgcatctcgaactctaccgtcgttacccgtcgcttggcggcattgtccatacccactccactcatgctactgcatgggcgcaggcggggctggcgatcccggcgttaggcactacgcacgccgactacttctttggcgacatcccgtgtacgcgcggattaagcgaagaagaggtgcagggcgagtatgaactgaacaccggcaaagtgattatcgaaacgctgggtgacgccgagccgctgcatacgccggggattgtggtgtatcagcacggtccgttcgcctgggggaaagatgcccacgacgcggtgcataacgcggtggtgatggaagaagtggcgaaaatggcgtggattgcgcgcagtattaacccacaactgaatcacatcgacagcttcctcatgaataaacacttcatgcgtaagcacggtcctaacgcctattacgggcagaagtaagcagtgcgccccggaattattacctcctgcgggatgtaattggtctgattccggggccgcttcagttaaaaaatcgtataaacaacaggtgtttttatggctatcaatggattgtttgtcagaacggatccgcaacgtcgccgctatggcgttgcgttacttgtgggtgtactttcaggaattatttcagcatttgttaaatggggagcggaagtccccttgccaccgcgcacattttccggtggtcgcgatgaatttaacccgccgtatatctttctacgggattatttaggtatcgacccaacccaaactgtgtatacattctcggaacatattatcaacccggtgatggtgacgcatatcatcttctcactggtttttgcgatagggtattgtattgtcgcggaaattttcccgaaagtgaaattatggcaggggatattagcagggcttattgtgacagtggcagtccacggtatattttgcccggcgctgaatttaacgccgccgctcactcaattgccttttgacgaatatgcctctgaaatcctggggcatattttctggttctggataatagaaattatgcgccgcgacttacgtaatcgcattactcatgagccagatccggaagtcgcaatccggtgaataaccgcataaaaaagccccctgcgaagggggcaaagcaaactatggcaatgtttcgttggttatacctggtgctagcgataaatatccgcgctggcgtgcatattgccgttactccccggttcccgcatcagaattacgtggtagtacgttgcgccctgcgcatctgtctcttcatttaatgcctgacgcgcttcgctttcagtggcgaaattatgattgatataaatcacgcctaagctttgcacatcatccatgtttctggcctggtggttattaatttcaatggctgcccatgtatttgcacttagcaaaagcacagccagaagggctaaaactcgactgaacatagatacctcctcgacggctgactttgtgtgctctcctctgtgatgatcttctgatttaattttaatcaatgataaagaagttgatggtgaccatttctgatgcagttgttcaaaaaaacaccatgatgaagtgtgatgaactccaaatcagcggtttagaggttaattgcgaaaggggagatttatttcggctctgcccttgagtttagcggggcatacaagtactataacgcgtcatttttcagccgacctttaacacgttccttgcctccccgggattcggctgacccagacaggaggctgaataatccgtaaggagcaattcgatgcgtcattacgaaatcgtttttatggtccatcctgaccagagcgaacaggttccgggcatgatcgagcgctacactgctgccatcactggtgcagaaggcaagatccaccgtctggaagactggggccgccgtcagctggcttacccgatcaacaaactgcacaaagcacactacgttctgatgaacgttgaagctccgcaggaagtgatcgatgagctggaaactaccttccgcttcaacgatgccgttatccgcagcatggttatgcgtaccaagcacgctgttaccgaagcatctccgatggttaaagcgaaagacgagcgccgtgagcgtcgcgatgatttcgcaaacgaaaccgctgatgatgctgaagctggggattctgaagagtaatttctgatgaccaaccgtctggtgttgtccggcaccgtgtgcaggactccccttcgaaaggtcagtccatcaggaattcctcactgccagttcgtgcttgagcatcgttctgtgcaggaggaagccggttttcaccggcaggcgtggtgccaaatgcccgttattgttagcggacacgaaaaccaggccattactcacagtataacggtcggcagtcgcataaccgttcaggggttcatttcatgccacaaggcaaagaacggactgagcaaaatggttttgcatgccgagcagattgaattgatagattctggagactagccatatggcacgttatttccgtcgtcgcaagttctgccgtttcaccgcggaaggcgttcaagagatcgactataaagatatcgctacgctgaaaaactacatcaccgaaagcggtaagattgtcccaagccgtatcaccggtacccgtgcaaaataccagcgtcagctggctcgcgctatcaaacgcgctcgctacctgtccctgctgccgtacactgatcgccatcagtaatcggtcacggtccattaatacgactttgagaggataaggtaatgcaagttattctgcttgataaagtagcaaacctgggtagcctgggtgatcaggtaaacgttaaagcgggctatgctcgtaacttcctggtaccgcagggtaaagctgttccagctaccaagaaaaacattgaattcttcgaagcacgtcgcgctgaactggaagctaaactggctgaagttctggcagctgctaatgctcgcgctgagaaaatcaatgcactggaaactgttaccatcgcgtctaaagctggcgacgaaggtaaactgttcggttccatcggtactcgcgacatcgctgacgctgtaactgcagctggcgttgaagtggctaagagcgaagttcgtctgccgaacggcgttctgcgtaccactggcgagcacgaagtgagcttccaggttcacagcgaagtattcgcgaaagtgatcgtaaacgtagtagctgaataattcgttattcaacgagacgtaaaaacgccgaccagtggtcggcgttttgcttttgtagcgagcacttgcagatatcgataagggccacaataagcagccctacgaagataattacttagctgcctgaatatcagccagcattggggcaagggctgggttgtccttagcgaagtttgcgtacattggctgtactttctcgataaacggagctttatctacctggtagactttcacgcccattttatccagttttgcaaattcttgtttctcttcctcgctccacaagtctttcatgtagctcattgattctttagctgcttttaatataactgcctgattttccgggctaagtttatcaaacgcagcattgctcatcagaaccacatcgggaaccatagtgtgttcgtcaaggctgaaggattttgccacttcaccgtgacgcatggtggtcagcgccatcacgctgttttctgccatatcgaccacaccctgctgtaaggctgtatacaactcgccgtaatccagtggcgtcgggttaccgcccatgactttgatcatttcaactgcgccagggcttggctggacacggactttcatgcctttcagatcgtctggtttcagtactggtttattgccatagaaactgcgggcgcctccatcataaaaagtcagcccgaaataacctttgcttttcgttgagtcgaggatttttctcccgatatcgccctgcatgacctgataataatgatcacgatcgcggaacaaataaggcaggctaaataatttataggaattttcaaatgcttccatttctgccgcattggtttttaccagtggaatagcgccagaacgaatcagctccattgtttctcgttgagtacccaatgttccatttggataaatacgaatagtaatatcaccgttagagtactctttgttctttttcgcaaagaactccatcgctttatgaacaggatgagacttatcctgattatgactcagttttaatgtcactgcccaggactggcttgcggataacataagaacagcaccgataatgccagcggatacttttattttcatagatgttccttttctaataaatatggcggcaggtgccgccagtgaatgcgcatcagtagcccagtgcttttggcaatgccatactgatttgcggaatataggtcaccattgccagcaccaataccatcacggcatagaatggcagcataggtttgataattttattaatcggtaatttagatacactacaaccgacaaataacacactgcctacaggcggagtacaaataccgatacacatgttcagtaccatgacaataccaaagtgaatcgggtccatgcccagttcggtgacaacaggtaaaaatatcggcgtaaaaatcagtaccgccggtgtcatatccataaaagtgccgataatcaacaggataatattgataataagcaggattattattgggttgtcagaaatagtgttaagcaaatcgagaatcaggaagggaacgtcagcgtttgacattgcccatgacggtaatgactccaacttattgatagtgttttatgttcagataatgcccgatgactttgtcatgcagctccaccgattttgagaacgacagcgacttccgtcccagccgtgccaggtgctgcctcagattcaggttatgccgctcaattcgctgcgtatatcgcttgctgattacgtgcagctttcccttcaggcgggattcatacagcggccagccatccgtcatccatatcaccacgtcaaagggtgacagcaggctcataagacgccccagcgtcgccatagtgcgttcaccgaatacgtgcgcaacaaccgtcttccggagactgtcatacgcgtaaaacagccagcgctggcgcgatttagccccgacatagccccactgttcgtccatttccgcgcagacgatgacgtcactgcccggctgtatgcgcgaggttaccgactgcggcctgagttttttaagtgacgtaaaatcgtgttgaggccaacgcccataatgtgtgcagttgcccggcatccaacgccattcatggccatatcaatgattttctggtgcgtaccgggttgagaagcggtgtaagtgaactgcagttgccatgttttacggcagtgagagcagagatagcgctgatgtccggcagtgcttttgccgttacgcaccaccccgtcagtagctgaacaggagggacagctgatagaaacagaagccactggagcacctcaaaaacaccatcatacactaaatcagtaagttggcagcatcaccgctaacccttggtttttaaaaattgtgcatagtgaaaatcaaagtaaaggtgtgcattatgcaaaatcactgcgtctcttagaaattaaccatgcgcacttgcagttaatggaatccttattggatgaagggaagaaacacaatatttttaagccagatatcgacccattgcaggtgaatattaatattgctgcgcttgggggatattatttgatcaaccagcatacgcttggcctggtttatcacatcagtatggtttcaccccaggcactggaagccagacgtaaggtcatcaaagagacaatccttagctggcttttggttgacccttcatctaccgcgcacgaataaaactgccatccggctggcgggtaaacaggacctgttgattattccccgtatcaatggttaagcccgtcaccacgccgctggcgttctggcggattttcaccatctgcccattttgcaaattactcagcggcttacccgcgccttctacctgcgccattgcatagacatcggtagcgggcagtccgtggtcgcggaacagctgcgccatcgttttaccgggttcgacacggtaagagcgccattgattatcaattccgctatctggctggaatggttgcgtttgggtagtttgcggctgttcttctggctggccttcctgtataggttctggagcgaccggagccacctgatcaggatcattttgtggtgtgactaattgcgcccgcagctgttcttctgtcggcggttgtgattgcgactgaatatctaactgcgcttcacgcgtcaccaccggcgcgttgggcgtatcatcagatggaagcagaaatccgaccaccaatacaatggcggcaataatgatcccccgacgatgcatcggcggcagcgggtccatgaagcgaaaattgtccggcgcgtgccagactttctccagggttggttttagttcaaagcgcccgggcatggtttcctcctgctccgcgtcttgttcctcaatcatagcctatgaataagctaacgctatgatgtccgtggtaaacccgcctttattatattcatacgggatattgctattgtttctttttccccgggatttgtcatcattcctgcgacaaagttttacccaaagaagtgtggctgatatgctgcccgctacttttataccctaagaaaggaaatacgatgaccaccccaacttttgacaccatcgaagcgcaagcaagctacggcattggtttgcaggtagggcaacaactgagtgaatctggcctggaagggctgctgccagaagcactggttgcaggtattgccgatgcgctggaaggcaaacatccggctgtgccggttgatgtggtgcatcgcgcgctgcgtgaaatccacgaacgcgccgatgccgttcgtcgtcagcgtttccaggcgatggctgctgaaggtgtgaaatacctggaagaaaacgccaaaaaagaaggtgtgaatagcaccgaatctggcctgcaattccgcgtgatcaaccagggtgaaggcgcaattccggcacgtaccgaccgcgttcgtgttcattacaccggtaaactgatcgacggcaccgtgtttgacagctccgttgctcgtggtgaacccgctgaattcccggttaatggcgtgatccctggctggattgaagcactgactctgatgccggtaggttctaaatgggaactgactatcccgcaggaactggcatatggcgagcgcggcgcaggcgcatccatccctccgttcagcaccctggtgtttgaagtcgaactgctggaaatcctctaagcagcgcattctgttcccctcgaaccagaggggagcaggcattcagcaataaacccttcagtttgccaaacggcgctattttgtgttgcaaagaccccgtaagcgtgtatttttgtgagctgtttcgcgttatcaccgtgatatgacactcactttaaacataaaattaacattagatctaaatcttagtattcatcccgcgtattgttacctaatatcgatgagtcccgatacagattcgtcgtatcatagactgactaaaggccgtagagcctgaacaacacagacaggtacaggaagaaaaaaacatggtagatcaggtaaaagtcgttgccgatgatcaggctccggctgaacagtcgctacggcgcaatctcacaaaccgacatattcagcttattgccattggcggtgccattggtacggggttgtttatggggtccggcaaaacgattagccttgccgggccgtcgatcattttcgtttatatgatcatcggttttatgctctttttcgtgatgcgggcaatgggggaattgctgctttcgaatctggaatacaaatcttttagtgacttcgcttccgatttactcgggccgtgggcaggatatttcaccggctggacttactggttctgctgggttgtaaccggtatggcagacgtggtggcgatcactgcttatgctcagttctggttccccgatctctccgactgggtcgcctcgctggcggtgatagtgctgctgctgacgctcaatctcgccaccgtgaaaatgttcggtgagatggagttctggtttgcgatgatcaaaatcgtcgccattgtgtcgctgattgtcgtcggcctggttatggtggcgatgcactttcagtcaccgactggtgtggaagcgtcattcgcgcatttgtggaatgatggcggctggttcccgaaaggtttaagtggcttctttgccggattccagatagcggttttcgctttcgtagggattgagctggtaggtacaaccgctgcggaaaccaaagatccggagaaatcactgccacgcgcgattaactccattccgatccgtatcattatgttctacgtcttcgcgctgattgtgattatgtccgtgacgccgtggagttcggtagtcccggagaagagcccgtttgttgaactgtttgtgttggtaggtttgcctgcggctgccagcgtgatcaactttgtggtgctgacctctgcggcgtcttccgctaacagcggcgtcttctctaccagccgtatgctgtttggtctggcgcaggaaggtgtggcaccgaaagcgttcgctaaactttctaagcgcgcagtacccgcgaaagggttgaccttctcgtgtatctgtctgctcggcggcgtggtgatgttgtatgtgaatcctagcgtgattggcgcgttcacgatgattacaaccgtttccgcgattctgtttatgttcgtctggacaattatcctttgctcgtacctggtttaccgcaaacagcgtcctcatctgcatgagaagtcgatctacaagatgccgctcggcaagctgatgtgctgggtatgtatggcgttctttgtgttcgtggtcgtgttgctgacactggaagatgacactcgccaggcgctgttggtcaccccgctgtggtttatcgcactggggctgggctggttgtttattggtaagaagcgggctgctgaactgcggaaataaccgcattatcatgctggatggcgcaatgccatccagcttttagattactcacccgccagcgcgcgtgggaacagtacattgttttccaggctgatgtgatccatcaggtcatcaatcagttcattaataccgttatacatcgctttccaggtggtgcaggcttccggcggcggtgtgacgttattggtggtgtgtttaatcacttccagcagttcgcccgcttcatcgtgctcgctttccatcacgctgattggtcccattgcctggctgcccatgccttgtttgatcatcgggaagaggatctgctcttctttcatcatgtggctggatagctcttcatgcagcatagtcaggtattttgtcagcccttttggcacgctcggtttgtcggcgtgaacgcgctcgactttagtcgcttgcaggatcagctccggcagttgctcgcggtgacgatcgtggtagcgcacgatgatatggtcaatgatttctgccagcggggcgctacgccagtctttctcaatcggttgttcagcaagctttgccagttcagcttcaatgacctcaacatccagttctttacgtgccgccgcgcgcgccagcgtttgcttaccgccacagcagtaatccatatcatatttacgaaacagagctgaagcgcgaggaatagagagcgccagttcacctaaaggttggtcgcgataagccatagctgatacctcattcttaataatataagatgtattttaaatgcatctttaaggcaaaagctataacccttacgtagcagaggcttatttaactcactgccagcgtgtcaactttctgagacagattcagttaaaggtttttctggttttgctctgaccgcaatgaccacgccaatcactaacagcgcgataccgctcagcgtcattagcggcggcatttgctggcggagtaaaaaggtgtacagcaaacctgccagcgtttcgaaaacaatcagcggcccgagaatcactgtcggtaatcgctggctggcgacgttccagcagagtgcgccaacccatgagcaaagcacggctatcgcaaccatcagactaataaacaccagcggacgggggccaaaaggtaaggagaagtccggcgtttgtatattcagccagtaacaggcgacgagatagccgatgagagaaaccggcagtgtgaccagcgcctgcgccgttgcccacatcatcggatgtttgtcgggattttcccgcagccagcgggcgttgcgcagggcataccacgcccagcagaccacggaaactaacgccagcacgatgccagaggtataacgtgcccagtcaaaatcggggagtccgtggtttaactcagcaatattcacacacgccaggccgatgccaatacaaaccagtgccggggcgagttttccccatgcgagtttgccgtcgcgctggctataaagcagattggcaaaaacgggaatcaccaccggcagggtgccgataatcatcgtggaaacaggcgcgccagtacgttgaatggcactggcaaggcagaagtaatagataaggttgcccatcatggtgagcatcaaggcggtaagccagtcgcgacgcgccaactgacgcagacgcacgcgtcccagccaggcaatgggcagcgcaattaaccctaacgccagataacgccccatcgactgcaacatcgccgggtattccggtacgatcaacggcccgacaaaaataagcccccacatcaaccctgctaacagggcgtacagcacgccgctaatcattactggcatccattggtctgtcagaagaaagttcaggaagcagacatgattgctcccggcatcccgtcattatcagagaggatgcgggaggatgccactttaattaactagttattaacattaaaaagatggcttacgctttcggctaacgttgtcgttgggcggccaatcaatttgctaagcgttttgctgttatcaaacagaccacctttcgatgcgccaacgtcagaatccgccagcatatccgccagtccgtcgggcagtccgacgcttttcagtgccgcggcgaaatcggcttcgctcagattttgataggtaacctgtttgccgctctgtttggtcagctctgccgctaactgtgtcaacgtccaggcactatcgcccgccagttcgtaaaccttgccttcgtgaccggcttcgctaatcacgcgtgccgcagctgccgcataatctgcccgcgttgctgaggcgattttgccatcgcccgccgcaccgataaatacgccgtgttccagtgctgccggggcgctggcgaggtagttttcgctgtaccagccgttgcgcagcagggtgtaaacgatgccagaatcagccagcattttctccgtctcaatgtgctcatcggcgaggccgagcggggaggtatctgcatgtagcaggctggtataagcgataaatttcacgccagccgcctttgcggcattaataacattacgatgctgcggggcacgttgacccacttcgctggaagagatcagcagtagtttttccactccctgaagtgcagatgtcagtgcggcttcatcgccgtagtcagcctgacgcacggtaatgccttgtgctgctagagcctgggcttttgccggattacgaacgatagccactatttggctggcaggaaccgttttcatcaaggattcaataatatagtgaccaagttggccagtggcaccagtaatagcgatcatgggaagtctccatcgttttgtcttgtgtttaaatacgctaacacctaaacttacttttagtaagtacgtacaaaaaggtaagtatgaaatgagtcaggttagcctgtcgcaacaactgaaagagggtaatctctttgcggaacagtgcccgtcgcgcgaggtgttgaaacacgtcaccagccgttggggggtgttgattctggtggcgctacgcgaaggtactcatcgctttagcgacctgcggcgcaaaatcggcggggtgagcgaaaagatgcttgcgcagtcgttacaggcgttagaacaggatggttttcttaaccgtatcgcgtatccggtggtgccaccgcatgttgaatacagcctcacgccgctgggcgagcaggtgagcgaaaaggttgctgcactggcggactggattgagttgaatttgcccgaggtgttggcggtgcgggatgaacgtgcggcataactgccggatgcgcggcctacggtgtatgacttgtagggcggataagatgcgccagcatcgcatccgccaataaatgccggatgcgattgatgatttataggccgaaaaagaagtgttttacttactcaaatccacctgataaatcgcaaacccgatatcatcggtcgcgactttattcatcggatactgccctttctctttaataaacgctgcggctttatttgacggggaagtttcgaaacggatatccagtttcttatcggcagctatcggtgctaaacgccagttgttatctgccgccgggtgaatttcccccgcacgtttcgactcatcagcaatccacgctgccagcaccgagcggttctcatccggtgaagcaaaagcgatatggctgtcgcccgtaccggcaaatttgccgccgtaagcgcgatagttattggtggcaacgaggaacatggcgttcggatcaatcggcttgccattaaaggtcaggttcttaatcctttccgcattggtattaatcatctggcactcgccgtcataacgggcgggctgggtaacatcaatctgataattcacaccatcaataacatcaaagttataagtgcggaaaccatcccagttgatgagtgactgtggtttcgtgctgttaggatcaatctggttaaactgtccggcggagcactccagccactctttcacctctttaccgctggctttcactacaatcagcgtattggggtagagataaagatcggcggcattacggaaggtcaactggcctttttccacctccacatagcttgccgggtcatttttgcgaccaccaactttaaacggtgcggcagctgaaagcaccggcagttttgccagatccggatcgccctgaatgtaatgttcgacatacgctttttgcgcgttgttcacgacttgcacggtcggatcgtcctgcaccagcgccagatagctatacatattgtcggcagatttaccgattggcttgctgacgaactggcgtgtggcatcgtgatcggctttgagtgtttctaccagcttgctgtcttccgccgcgagggattttttattggcgatgtcgtaaatcggccgagcttccgctttcgcctgcgtcacctgccatttaccgctgtcattactgagttgtaagtcgaccaccccaagatgatcgccccacatgcccggcattaccgccggaacaccattcagcgtgcctttggtgatatcagccccttcgatatcagcaaaatctttacccgggaaaacggcgtgagcatgaccaaacataatggcgttaacgcccggaatttcactgaggtaataaactgagttttccgccatcactttatacggatcggcagacagcccggaatgtgccagaacgacaacgacatcggcacctttctcgcgcatttcaggcacgtatttgcgcacggtttcggtaatatcattcaccgtcactttcccggataaattagctttatcccagcccatgatttgcggcggcacgacgccaatatagccaatcttcagcgtctgtttttttccgtctttatcgaccacttcggtatctttaattaaatacggtgtaaacattggctgtttggttctggcgtcaatgacgttggcatttacataagggaatttcgctcccgccagcgcatttttcaggtaatccagaccgtagttaaattcatgattgccgagtgtaccgaccgtataatccagcgtattcagcgccttataaaccggatgaacatcacctgtttttaatcctttcgccgacatgtaatctgccagcggactcccctgaatcaaatcgccgttatcgaccagtacgctgtttttcacttcattgcgggcatcgttaatcaggcttgccgtacgtaccagtccgaatttttccgtggcggtgtctttgtaataatcgaaatccatcatgttgctatgcagatcagtggtttccatgatacgcagatcgaccgtcgctgcattcacactggcggcaatcagcgtggccaggagcgttgcgctaaacttaatcatcagggacatccttttatcatcgggaatacgaaagaaaagggagaataaacgtcttacttatagaacagtgaagaatgccacaattttacgctttgaaaatgatgacactatcacagttggcgcattcattaacgatagggtataagtaaaacaataagttaacaccgctcacagagacgaggtggagaaatgttagatcaagtatgccagcttgcacggaatgcaggcgatgccattatgcaggtctacgacgggacgaaaccgatggacgtcgtcagcaaagcggacaattctccggtaacggcagcggatattgccgcacacaccgttatcatggacggtttacgtacgctgacaccggatattccggtcctttctgaagaagatcctcccggttgggaagtccgtcagcactggcagcgttactggctggtagacccgctggatggtactaaagagtttattaaacgtaatggcgaattcaccgttaacattgcgctcattgaccatggcaaaccgattttaggtgtggtgtatgcgccggtaatgaacgtaatgtacagcgcggcagaaggcaaggcctggaaagaagagtgcggtgtgcgcaagcagattcaggtccgcgatgcgcgcccgccgctggtggttatcagccgttcccatgcagatgcggagctgaaagagtatctgcaacagcttggcgaacatcagaccacgtccatcggctcttcgctgaaattctgcctggtggcggaaggacaggcgcagctgtacccgcgcttcggaccaacgaatatttgggacaccgccgctggacatgctgtggctgcagctgccggagcgcacgttcacgactggcagggtaaaccgctggattacactccgcgcgagtcgttcctgaatccggggttcagagtgtctatttactaaattcagatggcagaaacagtgtatttcctgattctgccatcctgatttctcccaacctaaaaagttataaataaaaagagattgtatttaaagtgcaaaaattcaattgctaataagttacattttaataatgagcgttttttgatagtttacttctctaatgagatatttaatggcgacataaaataaccaaataaaataaggttgtcatatgttacccaggatcagacacaataattttattggtgcggtggagttatttgtaaagtcatcgtatacaaaaacacattcaaacaatttttttaacaatatccagcatgcatttaagaaaaaagattggatttcgaattatgatagcctgttaactttgagggagttctttcgttgcgcaactcagattgataaaaatagttatcaggtactttcatcaaaaaatggaactgttaacgccatggataagttccttatcagtttcagccttaaagataacggtgccgaatatacaatgacattgcgaggtagtggatttgaatacgaagaaattcccataacaataaatgagtataactcattcatggatttcaaaaaccgcgagtttccgttagaacaaaacagaagattgtatgcctgtgatattctgcagaaaaaacagtctgacataccgaaaaggattaaaggttatattcaccaggcgattggtgacgtgtctttaggttatgccttattggaggatatagtaagcaaattaaaacggggtaaatttgaactccaaatactaggaggtggaattaaagaatgcgatggatggtatattcacgaaaaaataattgatgataattttgccatagtcatagaatctttgggctttgcgcttaaaatctatggaggggatgaacgttttcgtaatggttcctctgttgttttggaggatgaagattactcccttatttataattttctggttaatgcaggttgccaacaagtggaattagccgaacaagtggatgcgatagtaagtgcgaatctggccgcagatagtaatattaccaaagaaaagatttgcgagaaatataagtcgaccattgaggcgtttaaaaaagagcaactagcgttaccagtatgagttcggcgtaagaactcagagacttaattcccctatcccatagataacgataggggaaaattatttttgcagaatctatgttgttgccattatttgagcaacttttgcagcaggtccatcacttgctgcacctcttcctgagtgagcgccccgtctttggcccattgcacgcgaccatccttatccagcaccactacagcggaactttcttcatccagctgccaggcaccgcgcgcgacgccattgctatcgacaataaactgcgaccagggataaagctttttattactctccagactgctgcgcacaaacatccctgaacccggaatcgcgtcgtcggtgttaacaatagtggtggtctggtaacgatcgtgcggtaacttcgctgatttaatcgcttcaatcagcgtcgcgtttttctcttttgcagaggtgcgaccagcaatatgttgcagtactcgcacttttcccactaactgcgcgctgttccaggttttgtagctaaactgatctttatcaagcaccaactcgccccgatcggtaatgccaatcggcggcactcgctgaccggtttcgaactgatgtgcggaagccatcatcggcaacagcaggcaggtgagtgccagaatcttgcgtagggtcatggtgtttccttcttatgatatgcaggtgatccgaccacttgggtctgagttttaatcatatgtgctatttatcgaatttcccgcaagtgtgatgccagtttgcggtcaagcgcacaaatcatatgaaaaatgaatgcttatactgaagaccgcgcttcggtaaaaagataattctgaataattgtaacctttaggtaaaaaaagttatacgcggtggaaacattgcccggatagtctatagtcactaagcattaaaatttgcgcctcataatagttgggccgattgtggcaccgcacaggcgtaatactcagcaggagataacaatgaaaattttccaacggtacaacccacttcaggtggcgaagtacgtaaagatcctgttccgtggacggttatacatcaaggacgttggcgcttttgaatttgataagggtaagattcttatcccaaaagtgaaggataagctgcatttgtcagtgatgtccgaagttaaccgtcaggttatgcgtctgcaaacagagatggcttaaccaaagtgctatgcagtaaaaagtgctatgcagtaaaaagtgctatgcagtaataagacggctcctgattcaggagccgttgatgtttctggggggttacgcgacgctttcttctttatctttagcgtcaggcagttttggcgaaagggcggtggccttgctgtcgatccgggtcaccagcagctggtcgatgcggtagttatcgatatccaccacttcaaatttgtagccggcgaatttcaccgaatcggtgcgtttcgggatcttacgcagcataaacatcataaagccgccgatggtttcgtagttgcccgactgcgggaattcgtcaatatccagcacgcgcatgacgtcgtcaatcggagtgccgccgtcaatcagccatgagttctcatcacgggcgacaatctgctcttccagcccctgaccgaccagatcgcccatcagcgtggtcatcacgtcgttgagggtgatgatccccaccaccagcgcgtactcgttcatgatcaccgcgaagtcttcacctgcggttttaaaactttccaacgcctctgaaagggttaacgtatccggcacaatcagcgtgttgcgaatttgtacgccgctgttcagtgccaggctttggttagccagcacgcggttcagcaggtctttagaatcgacataaccgatgatgtggtcaatatcttcattacagacgaggaacttagagtgcggatgttccgccaccttattcttcaggctttgctcatcttcgtggagatcaaaccaaatcacgttttcacgcggtgtcattgaagacggaacggtacgggattccagctcaaagacgttttcaatcagctcgtgttcctgtttacgtaacacgcccgccagcgcaccggcttccactaccgcgtagatgtcatcagaagtgatgtcatctttacgtaccattggcagtttgaaaatacggaagatcatgttcgccaggccgttgaagaaccacaccagtggggtgcaaacgtacaggcagaagcgcatcgggttgatgatacgcaaagccaccgcttctggcgcaatcataccgatgcgtttcggggttaaatccgcaaacaggataaacatgccagtcactaacgagaaagagagaataaagctcagttgctcagagagctctgccgacatatagcgggagaacaggctgtgaaaagctggagaaaatgccgcatcaccgacgataccgccgagaatcgccactgcgttcagaccgatttggaccacggtaaagaacatgccgggattttcctgcatattcagaacgcgttgggcatttatattgccttcatcagccagcagtttaagtttgattttgcgtgaggcggcaagcgagatctcggacatcgagaagaacgcacttacagcgatcaagcagagtatgactaaaatactgtttaacatatcttatccgacctttcaggccagatcctcggaagggaaagttgattaatttgtgtgaaatacacattgaaagtcgattcgaagaaagtgaaccgacattttcagtggctagtatagcgtaaggtactgtaaagtcgccagagggttaaaattcagactgctgataaatgcaatactgcctgatgcgctatgccgatcaggcctacgcagtccttgcaatatattgaatttggacgattttgtaggcctggtaagtcgtttaagccgcatcaggcatagacaaagagcactttatcaacaaactacatttgtacccgtaacgctatgcttccggcggcagacagacgccaattccgccaattccacagtaaccatatgggtttttatgcagatattgctggtggtcatcttcggcataataaaacggtgtggcgttagcgatttccgtggtgatgtgacgatcgtcatcggcggcaagcatcgccgcctgaaaacgttccagactggcgcgagctgcggcatcctgttctggggtcagcggataaatcgctgaacgatactgcgtgccgtggtcattgccctgacgcattccctgggcgggatcgtgattctcccaaaatacctgtagcaactgctcatagctgatgacggaaggatcgtaaacaatgcgtaccgcttcggcatgacccgtatcaccggagcacacttcccgataagtcggatttggcgtatagccgccggtatagcctgcggcggtgctgtaaacgccgggtaactgccagaacagacgctccacaccccagaaacaacccatcgcaaaaatggcaatctccattccgtcaggtacattggtcattgagtgaccgttgaccgcatgcagcgtggctacgggcatcggggtgttacgtccaggcagggcatcggcgggggaaaccagatgctttttatcaaataaactcatggtgtcgctctcccgaaaatcggtcattggggttaaggttgtaacaagaggcgtatttgcacacaataaccaccgtgaataggtctaaagtaaaacataagaaatatttggggtttagtctgctttttaatccatattactggatttttgttaagccgtttaacggcgttccaggggtaggaaaaaaggatattcaggagaaaatgtgcgctatatccgacagttatgctgtgtaagcttactctgcttaagcggatctgccgtcgccgcgaacgtccgtctacaggtcgaggggttatcgggacagctggaaaagaacgttcgtgcgcagctttctacgattgaaagtgatgaagtgacgccagaccgtcgctttcgcgcacgcgtcgatgatgccatccgtgaaggtctgaaagcgctgggttattaccagccgaccattgaatttgatctccgtccaccgccaaagaaagggcggcaggtattgatcgccaaagtcacgccaggtgtaccggtgttaattggcggcaccgatgtggtattgcgcggcggcgcgcggaccgataaagactatttgaaattgctcgatactcgcccggctattggtacggtactgaaccagggcgattatgaaaatttcaaaaagtccttaaccagtattgcgttgcgtaaaggttatttcgatagcgaatttaccaaagcgcagctgggcattgcgctcggcctgcataaagccttctgggatattgattataacagtggcgaacgttaccgctttgggcatgtgacctttgaaggatcacaaatccgcgatgaatacctgcaaaatctggtgccgtttaaagagggcgatgagtatgaatcgaaagatctggcggaactgaaccgccgactttctgctaccggctggtttaattcggtggtagtggcaccgcaatttgataaagcgcgcgaaacgaaagtattaccattgacgggcgtggtttcgccgcgaacagaaaacaccatcgaaaccggggtcggttactctacggacgtgggaccgcgcgtgaaagcgacgtggaaaaagccgtggatgaactcttatggtcacagtctgaccaccagtaccagtatttccgcgccggaacagatccttgacttcagctataaaatgccgctgctgaagaatccactggaacaatattatttggtgcagggcggttttaagcgcactgacctgaacgataccgaatctgactccactacgctggtggcttctcgctactgggatctctccagcgactggcagcgtgccattaacctgcgctggagcctcgaccactttacccagggtgaaattaccaacaccacgatgctgttttatcctggggtgatgattagccgcacgcgttctcgtggtggcctgatgccaacctggggcgactcgcaacgctactctatcgactactccaacacggcctggggttcagatgtcgatttctccgttttccaggcgcagaacgtctggatccgcacactgtacgatcgccatcgttttgtgacacgcggcacgctgggctggattgaaaccggtgatttcgacaaagtaccgccggatctgcgtttcttcgccggaggcgatcgtagtattcgcggctacaaatataaatctatcgccccgaaatacgccaacggtgacctgaaaggggcctcgaagctgataaccggatcgctggaataccagtacaacgtgaccggaaaatggtggggcgcggtgtttgtcgatagtggcgaagcggtaagcgatattcgccgcagcgactttaaaaccggtaccgggggcggcgtacgctgggaatcgccggtcgggccaatcaaactcgattttgccgtaccggtcgcggataaagacgaacacgggttacagttttacatcggtctggggccagaattatgagtttatggaaaaaaatcagcctcggcgtggttatcgttatcttactgttgctgggatcggtggcgtttctggtgggcaccaccagcggcctgcatcttgtatttaaagcggcggatcgctgggtgccaggactggatattggcaacgtcaccggcggctggcgcgatctcaccttgtctgacgttcgttatgagcagccaggcgtggcggtaaaagcgggtaatctgcatctggcggtcggtcttgagtgcctgtggaacagtagcgtttgtattaatgacctggcgctgaaagacattcaggtcaacatcgacagtaaaaaaatgcctccttctgaacaggttgaagaagaggaagatagcggtccgctggatctctccacgccgtatcccatcaccctgacacgggtggcgctggataacgtcaacatcaagattgatgacaccacggtgtcggtgatggacttcacctccggcctgaactggcaggagaaaaccctgaccctgaaaccgacgtcgctgaaaggcctgctgattgctctgccgaaagtggcggaagtggcgcaggaagaggtcgtcgaaccgaagattgaaaatccgcagccggatgaaaagccgctcggcgaaacgctgaaagatctcttttctcgcccggtattgccggaaatgaccgacgtgcatttgccgcttaacctgaacattgaagagtttaagggcgagcagctgcgcgtgacgggcgacacggacatcaccgtgcgcaccatgctgctgaaagtgagcagcattgacggcaatactaaactggacgccctggatatcgattccaaccaggggatcgtcaacgccagcggcacggcgcagctgtcagacaactggccggtggatatcatcctcaacagcacactgaacgtggagccgttgaaaggtgaaaaggtgaagctgaaagtgggcggcgcgctgcgcgaacagctggagataggcgttaacctttccggtccggtggatatggatttacgcgcccagacgcgactggcggaagccggattgccactcaacgtggaagtgaacagcaaacagctttactggccgttcactggtgagaagcagtatcaggcggatgatctgaaactgaaacttaccggcaaaatgaccgattacacgctctctatgcgtacggcagtgaagggacaggagatcccgccagccaccattacccttgatgccaaaggtaatgaacagcaggtcaatctcgacaaactcaccgtcgcggcgctggaagggaaaactgaactcaaggcgttgctcgactggcagcaggccattagttggcgcggtgagctaacgcttaatggcattaacaccgccaaagagttcccggagtggccgtcgaaactcaatggcttgattaaaacccgcggtagcctgtacggcggcacctggcagatggaggtgccagaactgaagctgaccggtaacgtcaaacagaacaaagtgaacgttgacggcacgctgaaaggcaacagttatatgcagtggatgatccctgggcttcatctggaactcgggccaaacagtgccgaagtgaaaggcgagctgggggtaaaagatctcaatcttgatgccaccatcaacgcgccggggctggataacgcgctgccggggcttggcggtacagcgaaagggctggtgaaagtacgcggcacggtggaagcgccacaactactggcagatatcaccgcgcgcggcctgcgctggcaggaactttccgtggcgcaggttcgcgtggaaggcgacattaaatccaccgatcagatcgccgggaaactcgacgtacgcgttgagcaaatttcgcagccggatgtaaatatcaacctcgtcaccctgaatgccaaaggcagcgaaaagcagcacgagctacagttgcggattcagggcgagcctgtctccgggcagcttaatctggcaggaagttttgatcgcaaagaagaacgctggaagggaactcttagcaatacccgtttccagacgccggtcggcccgtggtcgctgacccgcgatattgcgctggattaccgcaataaggagcaaaaaatcagcatcgggccacactgctggcttaacccgaatgcggaactgtgcgtgccgcaaactatcgatgcgggggccgaagggcgtgcggtggtgaatctcaaccgcttcgacctcgccatgctgaaaccgtttatgccagaaaccactcaggccagcggtatcttcacgggtaaagcggatgttgcctgggacaccacgaaagaggggctgccgcagggcagtatcaccctttcggggcgtaacgtgcaggtaacgcaaaccgtcaacgatgcggcgctgccggtggcgtttcagacactgaatctgacggcggaattgcgtaacaaccgtgccgaattgggctggaccatccgcctgaccaataacggccagtttgatggacaggtgcaggtgaccgatccgcaaggccgccgtaatcttggtggcaacgtcaatatccgtaacttcaaccttgcgatgataaaccccatctttacccgtggggaaaaagcagcggggatggtgagtgccaacttgcgtctgggtggtgatgtgcaaagcccgcagttgtttggtcagcttcaggttacgggtgtggatatcgacggcaactttatgccgtttgatatgcagccgagccagcttgcggtcaactttaacggtatgcgctcgacgcttgccggtacagtacggacccagcagggtgaaatctacctgaacggtgatgccgactggagccaaattgaaaactggcgggcacgagtaacggcgaaaggcagtaaagtgcggatcaccgtgccgccgatggtacgaatggatgtatcgccagatgttgtattcgaggctacaccaaacctgtttaccctcgatggtcgcgtggatgtcccgtgggcgcgcatcgtggtgcacgatctgccggaaagcgcagtaggcgtctccagcgatgtggtgatgcttaacgataacctgcaaccggaagagccgaaaacggcgtcgattccgattaacagtaacctgattgtccacgttggcaacaatgtgcgcattgacgcctttggcctgaaagcgcggctgacgggcgatcttaacgtcgtacaggacaaacaagggctgggcctgaacgggcagatcaacatccctgaagggcgcttccatgcctatggtcaggatctgattgtgcgtaagggtgagttactgttctctggtccgccggatcaaccgtatcttaatattgaagctattcgtaacccggatgctacagaagacgacgtaattgccggagttcgcgtcactggtctggcggacgaaccgaaagcggagatcttctctgacccggcgatgtcgcaacaagctgcattgtcttatttgctacgtggacaagggctggagagcgatcagagcgacagtgcggcaatgacctcgatgctgattggtctgggggttgcgcaaagtggccagattgtgggtaaaatcggcgagacgtttggcgtaagcaatttagcgctcgacacccagggagtaggcgactcctcccaggtagtggtcagcggctatgtattgccaggtctgcaagtgaaatacggcgtgggtatatttgactctatagcaacactcacgttacgttatcgcctgatgcctaagctatatctggaagccgtgtctggtgtagaccaggcactggatttgctctatcagttcgagttttagcaatgcgaatatttgtctacggcagtttacgccacaaacaaggcaacagtcactggatgaccaatgcccagttactgggcgatttcagtatcgataactaccagttgtatagcctgggccactatccaggcgcagttccggggaacggaacggtacacggtgaagtttatcgtattgacaacgccacgctggccgaacttgatgccttgcgcaccaggggcggtgaatacgcgcgccagttgattcagacgccgtacgggagtgcatggatgtacgtttatcaacgacccgtcgatggattaaagctaattgaaagcggcgactggttagacagggataagtaataataaaagcacgccaccttcgggtggcgttgttttatgcgatgtatctcgcgatttttttttgtaacttttccatcttttgcttttctctccgagccgctttccatatctgcaatcgcataaaaaactctgctggcgttcacaaatgtgcaggggtaaaacgggggcacgctttgaacggtgagtatgagtgaggtcggctaacttccagcaagtggctatgaacagcaaaatggtggtcgggtttgcttgttcttaccgttcaagccttgcaaccgctgagaataatgatggtggaatagagagtttatttatcgcgggcataaaaaacccttactaaccgaagcccggcgttcagggttattgcgctagaagaacttatttattctttgcgcgctcgaaggaagcaacgatttcagctttagcggcttctgcgttttcccaaccttcaactttcacccacttgcctttttcgaggtctttgtagtgctcgaagaagtgagcgatttgcgctttcagcagttcaggcagatcgtttacgtctttaatgtgatcgtattctttgctcagcttgctgtgcggaaccgcaaccagtttcgcatcttcaccggcttcgtcggtcattttcagaacgccaaccggacggcaacggatcacagaaccaggctgcagcgggtacggagtcgggaccagtacgtcaaccgggtcaccgtccagagacagggtgtggttgatgtaaccgtagttgcacggatagaacatcgcggtggacatgaagcggtcaacgaacagtgcgccgctctctttgtcgatttcgtatttgatcggatctgcgttagccgggatctcaataacaacgtagatgtcttccggcagatctttacccgcagggacgttgagtaagctcatgtctgtttcctttaaaaatatgtggcaaacaagtgccgagtattatagccaactcgcgccgaatgtctttgcttgttttcgtcttcattttcctttttcgccagttttaagacggtatacagagcaggaaaatccataaccgtagccgcatttttcatagtgagatgaaagcgattacaaacttgtgattaacgttttatttacttttttgaagtgtgatgtaacgcaatccgttacataacgaattgtctatagttttttcgcgaacatcttttcaccaataataattaccccgacgaggacaaccctatgtggaaacgcttacttgtagtctctgcagtctcggcagccatgtcgtctatggcgttggcagctccattaaccggaggattttcgcaggtcggatcggaatccggctggcgcgccgcagaaaccaatgtggcgaaaagtgaggccgaaaaacgcggaattacgttgaaaattgccgatggtcagcaaaagcaggaaaaccagattaaagcggtacgttccttcgttgcacaaggggtggatgcgatctttatcgctccagtggttgcgacgggttgggaaccggtattaaaagaggcgaaagatgccgaaatcccggtcttcttgctcgaccgttccatcgatgtgaaagacaaatctctctatatgaccaccgttactgccgacaacatcctcgaaggtaagttgatcggtgactggctggtaaaagaagtgaatggcaaaccatgcaacgtggtggagctgcagggcaccgttggggccagcgtcgccattgaccgtaagaaaggctttgccgaagccattaagaatgcgccaaatatcaaaattatccgctcgcagtcaggtgacttcacccgcagtaaaggcaaagaagtcatggagagctttatcaaagcggaaaacaacggcaaaaacatctgcatggtttacgcccataacgacgacatggtgattggtgcaattcaggcaattaaagaagcgggcctgaaaccgggcaaagatatcctcacgggttccattgacggtgtaccggacatctacaaagcgatgatggatggcgaagcgaacgccagtgttgaactgacgccgaacatggcgggacccgctttcgatgcgctggagaaatacaaaaaagacggcaccatgcctgaaaagctgacgttaaccaaatccaccctttacctgcctgataccgcaaaagaagagttagagaagaagaaaaatatggggtattgagggttgctatgcctgatgccgattcgtaggccggataaggcgctcgcgccgcatccggcgatggtgcactgaagcctgatgcgacgcttaccgcgtcttatcatgcctactgggagcacgctttacaccgggggaaaccatgacgaccgaccaacaccaggagatcctccgcaccgaaggattaagtaaatttttccccggcgtcaaagcgttagacaacgttgatttcagcctgcgccgtggcgaaatcatggcgctgcttggtgaaaacggggcgggaaaatcaacgctaatcaaagcattaactggtgtataccacgccgatcgcggcaccatctggctggaaggccaggctatctcaccgaaaaataccgcccatgcacaacaactcggtattggcaccgtctatcaggaagtcaacctgctacccaatatgtcggttgctgataatctattcataggtcgcgaacccaaacgtttcggccttctacgccgtaaagagatggaaaagcgcgccaccgaactgatggcatcttacggtttcttcctcgacgtgcgcgaaccgcttaaccgcttttcagtcgcgatgcagcaaatcgtcgccatttgccgggctatcgatctctccgccaaagtgctgatcctcgatgaacccaccgccagcctcgacacccaggaagtggagctattatttggcctgatgcgtcagttgcgcgatcgcggcgtcagcctgatctttgtcactcactttctcgatcaggtctatcaggtcagcgatcggatcactgtcttacgcaacggcagtttcgtaggctgtcgggaaacgcgcgagctaccgcagatcgaactggtaaaaatgatgctggggcgcgagctggatacccacgtgctacagcgtgccgggcgaacattgttgagcgacaaacccgttgccgcgttcaaaaattacggcaaaaaaggaacgatagcaccgtttgatctcgaagtgcgccccggcgagatcgtcggtctggctggcttgctgggatccggacgtaccgaaaccgccgaagtgatcttcggtatcaaacctgctgacagcggcacggcgttgatcaaaggcaaaccgcaaaccctgcgatcgccacatcaggcttcagtactgggcatcggattctgcccggaagacaggaaaaccgatggcatcatcgccgccgcctcggtgcgggaaaatatcatcctcgctctccaggcccagcgcggctggctacgacccatttcccgcaaagagcagcaagagattgccgaacgctttatccgccagcttggcattcgcacaccttcaactgaacaaccgattgaatttctctccggtggcaatcagcaaaaagtgctgctttcacgttggctactgacccgaccgcaatttctgatccttgatgagccaacccgtggcattgatgttggtgcccacgccgagatcatccgcctgattgaaacgctgtgtgctgacggtctggcgctgctggtgatctcctccgaactggaagagctggtgggctatgccgaccgggtgatcatcatgcgcgatcgcaaacaggtggcggagatcccgctggcacagctttccgttccggcgatcatgaacgccattgcggcgtaaggagaacagtgtgatgcctcaatctctccctgacactacgccgccaaaaaggcgttttcactggccgacggggatgccgcagctggcggcactgttgctggtgctgctggtcgatagcctggtagccccgcatttctggcaggtggtgcttcaggatgggcgtttgttcggtagccctatcgacattcttaaccgtgcagctcccgttgcgttactggcgattggtatgacgctggtgatcgccaccggtggtatcgatctctctgtgggggcggtgatggctatcgccggagccacaacggctgcgatgacggtcgcgggattcagcctgccgattgttttgttaagcgccctgggcaccggcatcctagcgggattgtggaacggcatactggtagcgatcctcaaaattcagccgtttgtcgccaccctgatcctgatggtcgccgggcgcggcgtggcgcaactgatcaccgccgggcagatcgtcacgtttaactcgccggatctctcatggtttggcagcggatcgctgttgttcctgccaacgccggtcattatcgcggtgctgacgcttctcctgttctggctgttgacccgcaaaacggcgctggggatgtttatcgaagccgttggtatcaacattcgggcggcaaaaaatgccggagtcaacacacgaatcatcgtcatgctcacctacgtgttgagcgggctatgtgcggcgattgcgggcattatcgtggcggcggatattcgcggtgccgatgccaacaacgccggattatggctggagctggatgccattctcgcggtggtgattggcggtggatcgctgatgggcggtcgctttaacctgctgctttcgggagttggggcgctgattattcagggaatgaataccggaattttgctttcgggctttccgccagagatgaaccaggtggtgaaagcggtggtggtgctttgtgtgctgattgttcagtcgcaacgctttatcagtctgattaaaggagtgcgtagccgtgataaaacgtaacttgccgcttatgatcaccatcggcgtctttgtgctgggctatctctactgcctgacgcagtttcctggttttgcttccacaagagtgatctgcaatatcctgaccgataacgcctttcttgggatcattgccgttggcatgacctttgtgatcctctccggtgggatcgatctctccgtcggttcggtgatcgcctttaccggcgtgtttctggcaaaagtgattggcgatttcggcctctcgccgctgctggcgtttccgctggtgctggtgatgggctgtgccttcggcgcatttatggggcttctgatcgacgccctgaagatcccggcgttcatcattacgcttgcggggatgttctttttgcgcggcgtcagctatctcgtttcggaagagtcgattccgataaaccatcccatttatgacacgctctcaagccttgcgtggaaaatccctggcggcggtcgcttaagtgcgatgggactgctgatgttggcggtggtggttatcggcatattcctcgcgcatcgtacccgttttggtaatcaggtatacgccattggcggcaacgcaacgtcggcgaatctgatggggatttccactcgcagcaccactattcgcatttatatgctctccaccggactggcaacgctggcggggattgtcttctcgatttatacccaggccggatatgcgctggcgggcgtaggtgtggagctggatgctatcgcctcagtggtaattggcggtacgcttttgagcggtggcgttggaacggtattagggacgctttttggcgtggcgattcagggactgattcagacttacataaactttgatggcacgctgagttcctggtggacgaaaatcgccatcggtattttgttgtttatttttatagcattacagcgtggattaacggtgctgtgggagaatcgtcagagttcgccagtgacaagagtcaacattgcgcagcaataaaaacgcctctccgtgtggagaggcgcaggagattacgcgtccgggaactcacggataaagcgttcgacatcttcaaccatatggtcgttgccgacaaagaacgaacggcgctggtgcagggtttccgggatgatatccagaatacgctctttgccatcgctcgctttaccgcccgcttgttccgccaggaatgccatcgggttgcactcataaagcaaacgcagtttgccgtccgggtggctggcggtgcttgggtagagataaataccgcctttcagcaggttacggtggaaatccgcaaccagtgaaccgatataacgcgaggtatacgggcgattggtggatttatcttcttcctggcagaatttaatgtacttcttcaccccgttcggaaacttaatgtagtttccttcgttgatggagtaggttttgcctttctccgggaagcgcatccgttcctggcacaggcagaaaacgcccagcgaaggatcgtaagtaaaggcgtgaacaccgcatccggtggtgtaaaccagcatggtagaggagccgtataccacgtaacctgccgcaacctgtttgttaccaggctggaggaaatcttcttccgttaccggcgtgccaacaggcgtaacgcggcggtagatggagaaaatggtaccgacagagacgttaacatcgatgttggacgagccatccagggggtccatcagcaccacgtattttgcgtattcacagccttcaaagacgacaatctcatcttcttcttcagaggcaatccccgcaacgatatcgcgtgctttcagtgcggctttcagtttttcattagcgaacaagtcgagtttttgctgaacctcgccctgcgcgttctcagcaccgctggcacccaggatatcaaccagtcctgctttgttgatatcgcgatggataatcttggcgcccagttttattgccgacagcaaagcagtgagctcaccggtagcatgagaaaactcgtgctgcttttcgacaataaattcacctaacgttttcataaaactttccctgcaatgtttatggagtaaagcgaccgcaacaatcttaacaaataatctcaatgttgcgctcaggtgaatcgcgccagcaaattgcggattatcctgaaatgcgtttctcacttgcccgacatatgcgtaaaatgagcggcagattaaaaaaggatagtgacgtatgcgcattcatattttaggaatttgtggcacatttatgggcggtctggcgatgctggcgcgccagttaggccatgaagtaacgggttcggacgccaatgtgtatccgccgatgagcaccttacttgagaagcaaggcattgagctgattcagggttacgatgccagccagctcgagccgcagccggatctggtgattattggcaacgccatgacccgtggaaatccgtgtgtggaagcggtactggaaaaaaacatcccttatatgtcaggtccacagtggctgcacgattttgtgctgcgcgaccgctgggtgctggccgttgccggtacacacggcaaaaccaccaccgcgggaatggcgacctggattctggaacagtgtggttacaaaccgggatttgtgatcggcggtgtgccggggaactttgaggtttcggcgcgtctgggcgaaagcgacttctttgttatcgaagcggatgagtacgactgcgccttcttcgacaaacgctctaaatttgtccattactgcccgcgtacgctgatcctcaacaaccttgagttcgatcacgccgatatctttgacgacctgaaagcgatccagaaacagttccaccatctggtgcgtatcgttccggggcagggccgtattatctggccggaaaatgacatcaacctgaaacagaccatggcgatgggctgctggagcgagcaggagctggtgggtgagcagggtcactggcaggcgaaaaagctgaccaccgatgcttccgaatgggaagttttgctggatggcgaaaaagtgggcgaagtgaaatggtcgctggtaggcgaacataatatgcacaatggcctgatggcgattgcagcggctcgccatgttggtgtagcgtcggcagatgccgctaacgcgctgggttcgtttattaatgctcgtcgccgtctggagttgcgtggtgaagcgaatggcgtcacggtatatgacgattttgcccatcacccgacggcgattctggcaacgctggcggcgctgcgtggcaaagttggtggtacggcgcgcattattgctgtgctggaaccgcgctcgaataccatgaaaatggggatctgcaaagacgatctggcaccttcattaggtcgtgccgatgaagtcttcctgctgcaaccggcgcatattccgtggcaggtggcagaagtggcagaagcctgcgttcagcctgcacactggagtggcgatgtggatacgctggcagatatggtggtgaaaaccgctcagcctggcgaccatattctggtgatgagcaacggcggttttggtgggatccatcagaaactgctggatggtctggcgaagaaggcggaagctgcgcagtaattcggcttcagcctgatatagcattgccggataaggcgtttacgccgcatccggcaaaccatactcacatcaacaacgaaaattacccttcattctccgccagttcgcgcagatactggaaaatctggcgtgcggatttcggcggcttattcccttctttctctttcttcgcgttgcggatcagtgtacgcagttgctgacgatcggcatcgggccacagattcaatacttcagcgatggcgtcatcaccttgatcgatcagacgatcgcgcaggttttccagtttatggaacagcaccacctgctggttgtgacggtttttcagcttatccagcgcctgacgaataggctctacgtcgcgctggcgcagcatcttaccgatgagctgcaactggcggcggcgaccttccatcttaatacgctgggcgagctcaatagccgcgcgcagatccgcatctaacgggatcttatccagcgcgtttttccccagatcaacaatttccgcgccaaggcgttttagctcctcggcatcacgtttaatttcacttttactgacccagataatttcatcgtcttcgtcttcgatgtcatcaccgggaacgtcgtcgagccagtcttcgggctgcttagtcatctcaggctccttaaaaaaagaggctaatgttaccagttaagatgcgcactgaaaaacggttctctgttagacttcagagaaactctctacattatggcacttgcaatgaaagtaatctctcaagttgaagcgcagcgcaagattctggaagaagcagtttccactgcgctggagttggcctcaggcaaatcggacggtgcggaagttgccgtcagcaagaccaccggcattagcgtaagcacgcgttatggtgaagtggagaatgttgaattcaatagcgatggcgcgctggggatcactgtttatcaccagaaccgcaaaggtagcgcatcatccaccgatttaagcccgcaggccattgcccgtactgtacaggcggcgctggatattgcccgttatacctcgccagatccctgtgccggcctggcagacaaagagctgctggcctttgacgcaccagatctcgacttgttccaccctgcggaagtttccccggatgaagccattgaactggcggcccgcgcagaacaggcagcattacaggcggataaacgtatcaccaataccgaaggtggcagctttaacagccactacggtgtcaaagtttttggcaacagccacggcatgttgcagggttactgctcaacgcgtcattcgctctccagctgtgtaattgccgaagaaaatggcgatatggagcgtgattacgcctacaccattgggcgcgcgatgagcgatctgcaaacgccagagtgggttggggccgactgtgctcgccgtactttatcgcgcctgttaccgcgtaaactctccaccatgaaagcgccagtcatttttgccaatgaagtggcaactgggctttttgggcatctggtgggggcgatagcgggtggatcggtttatcgtaaatctaccttcctgctggattcgctgggtaaacaaattctgccggactggctgaccattgaagagcatccgcatctgctgaaagggctggcgtcgacgccattcgacagcgaaggtgtgcgcaccgagcgtcgcgatattattaaagatggcatcctgactcagtggctgctgaccagctattcggcgcgaaaacttgggctgaaaagcaccggacatgcgggcggtattcacaactggcggattgccggacaagggctaagcttcgaacaaatgctcaaagagatgggcaccgggctggtggtgacggagctgatgggccagggcgtgagtgccattaccggtgattattcccgtggtgctgcgggcttctgggtagagaatggcgaaattcagtatccggtgagcgaaatcaccatcgcaggtaatttaaaagatatgtggcgcaatattgtcaccgtcggtaacgatattgaaacacgcagtaatatacagtgtggttctgtgctgttgccggagatgaaaatcgccggacagtaaaaaaactggcgcgacctgccgcgctataaactaaaaaattacacaaaatcattcgcactgcatcgagacggaaagtgaatgagagccggggagcgtactcgtagtacgtgacccggtcgaatgagcgtagctgtcgatgaggcagtgtgaaggatgaagtgtaaataaaaaaggaagtgagcaatgcgtaaaagcctgttagctattcttgcagtctcctcgttggtattcagttcggcgtcgtttgccgctgatcttgaagacaatatggaaaccctcaacgacaatttaaaagtggtcgaaaaagccgataacgcgacgcaagtcaaagacgcgttaacgaagatgcgcgccgcagcgctggatgcgcaaaaagcaacgccgccgaagctcgaagataaatcaccggacagcccggaaatgaaagatttccgccacggtttcgacattctggtcggtcagattgacgacgcgctgaagctggcaaatgaaggtaaagtaaaagaagcgcaggctgctgcagagcaactgaaaacgacccgcaacgcctatcaccagaagtatcgttaattcctcatttccctgttgcctgcactcaggtaacagggaacttatcatcgcaaatgatgcaccacctgattgctgctgccgcgccagatcagggaagggtcttttaaatcctgcacaaatttgccgtcgaccagcacgttaatcaaatcaacaacctgcatttgcgcagcgttgagttcgtcgagtttatagcctgtccacacccagatgtctttacccggacactcggcgcggatgcgttttaccagtttcagaatatccggcacgttttgcggatgcagcggatcgccgccggagagggaaatcccctggcgtttgatacgagtgtcattcagatctttaatgatcttgtcttccattgctttggtaaatggctgaccagaatttacccgccatgtgcttttgttatagcaaccggggcattcatgaacacacccggagacaaacagggtgcagcgagtgccggggccgttgacgatgtcgacaggatagtactgatgataattcattatttcgcctggcttatcagtccgcgtgtaggctgcatccggtaatcaatgcctgatgcgacgctgtcgcgtcttatcaggcctacagccgttgccaaatgtaggccggataaggcgtttacgccgcatccggcatttgcttaacgcagagtgaagattaacctatctgcccattccccaaatgtttaacgcggcgcttaacttcttcctgcttaccggcgttaaacggacgcgcatccgggctacctaaatatccgcacacgcggcgagttaccgacacacgggaggcgtcatggttaccacatttcgggcaagtgaagcctttgctggtgcactcgaactcaccggtaaagccacactcgtagcactcatcaatcggtgtattggtgccgtaatacggtacatgctgatagctgtaatcccagacatcttccagcgctttcaggttgtgctgaatgtttggatactcgccgtagcaaatgaaaccaccgttcgccagcggcgggtaaggcgcttcaaagtcgatcttgtcgtacgggttcaccttcttctccacatcaaggtggaaactgttggtgtagtaacctttatcggtcacgcccggcaccacgccaaactcagcagtatcgagacggcagaagcggtcgcacaggttttcactcggcgtgctgtagagactgaaaccataacccgtttcttctttccactgatccactgcctgacgcagacgttcaacaatggcgatacctttcgcgcgaagctgctcgttgtcgtaaacatgctcgccgccgaacagcgcgttaatggtttcgtggatgccgatgtaacccagcgaaatagacgcacgaccgtttttgaagatttcagaaacatcatcgtcagcattcagacgtacgccacaagcaccttccatatagaggatcggggcgacgcgcgctttcacgccttcgagacgagcgatacgggtcatcagtgccttacgtgccagcaccagacgttcatccagcagcttccagaaggtggcttcatcgccttttgcttccagagcaatacgcggcaggttcaggctgatcacgccgaggttgttacgaccatcgtggatctgctcgccgttttcattttcccacacgccgaggaagctgcggcagcccatcggggttttaaacgaaccggtgactttcactacctgatcgtagttcaggatatccggatacatgcgcttgcttgcgcactccagcgccagctgtttgatgtcgtagttcggatcgccttttttatggttcaggccatcgcgaatcgcaaacaccagtttcgggaacaccgcagttttacggtttttaccgaggcctgcgatacggttacgcaggatcgattcctgaatcaggcgcgattccctgctggtgcccagaccaaaaccaaaggttacaaacggcgtctgaccgttggcggtgtgcagggtgtttacttcgtactccagcgactggaaggcatcgtagcactctttgatggtacgagagttagcgtagccttcggcgtccgggatgttccactcttctgcggtcttgcgatgtttgttgtagctggcggtaacaaacggcgccagcacttcatcgatacggttaatggtggtgccgccataaatatggctggcgacctgagcaataatctgcgcagttaccgcggttgccgtagagatcgacttcggcggttcaatctcggcgttccccattttaaagccctgggtcagcatgcctttcaggtcgatcaacatgcagttgaacatcgggaagaacggcgagtaatcgagatcgtgatagtgaatatcgccacgctcatgtgcctgcaccacgtcacgcggcagcaggtgctggcgtgcatagtgtttagccacgatcccggccagcaggtcgcgctgggttggaatcaccttgctgtctttgttggcgttttcgttgagtaacgaggcgttggtctgctcgaccagaccacggatctcctggttcaggcgaccgcgtttttcacgttcaatgtcgcgatcgtgacggtactcgatgtaagcacgagccagttgtttgtatggacccgacatcagctggttttcaactgcggtctggatctcgttgatatccacctggttgcggccctgcatctgctcgctgacaaccgcggcaacagtggcgcaataatcggcatcatcgacttccgctgctttagctgcacgcagaatcgcttctttgatgcgctctgatttaaacggcactttgcagccgtctcgtttcatcacatgcggtgtcatgatcgctccatatttttaagaacaggttatccacagaaattgggaaaggcgttttccggttttttcgtttcgttttccggtgctttccgcaatcgccatccgcttatccacaacgccgcacctttttcgtggggagctgtagtagcaattatagtcgattaatacaacatattgggttgggacgcattttaaagtctatatatagtgctttgcatcaaggatgttttaactttttttgatgtagctcaaagtaaaaagcagagcgtacggatgacgggcgctacagcgttatgtaaattttttaatgaatttgctggttgaaaaatcaacaaaaacaacatgctgacagacaaaaccccggaatgaccggcattaccggggcttagggaagatttacttctgtaaccaccagacagcctcaaaaggccgtaaattcatggcacagggttgtggtgaggcttcttcgtagttatgcatcacaagctgccagttgccgcgcatttgccctggctgccagggttggatctcacggctaaggttggcaatgaccagcaaggtttgccccttccattcacggcgatagcaccacaatacagggctgtttggcagcagatcctggtaattgccccatgtcaggatggcttcttgcttacgcagtgcgattaacttttggtaggtgtaaaacaccgaggagtcatcggccagcgcggcttctacgttgatttgttgatagttatcgcccaggccaatccacggttcgccagccgtaaacccggcattatcgccgttgctccattgcatgggcgtgcggctgttgtcacgggatttactggcgaggattgccaataactcgtcggcatcacgaccatcgttgcgcagctcggcaaacatattgaggctctccacgtcgcgatagtcagtaatgcgcgtgaaatgcgggttggtcatgccaatctcttcgccctggtagatatacggcgttccctgcatgccatgcagcaccatcgccagcatttttgccgcaggcacgcggtattcaccttcatcaccaaagcgagaaacaatgcgcggctgatcgtggttacaccagaacaaggcattccatgccacgttgtgcattccttgttgccagtggcggaacaatgttttcaacgccacaaagtcaggtttagccagcgtccatttttcaccaccgggataatcgaccttcaggtgatgaaaattaaaggtcatcgacaattcactgcctgtcagtgccgcgtatcgctggcaatgctcaaggctggtggaggacatttcacctacggtcattaacccgcgtggcgtaaacacatcgcggttcatctcgtgcaaaaactcgtgtgctcgtggcccgtcggtgtagaagcgacgcccgtcgccatccaggtcttcagggaaacgcgggtctttggagatcagattcaccacatccaggcgcaacccgtcgaccccacgatcggcccagaattcacagacttttttcagctctgcgcgtaccgctggattctcccagttgagatccgcctgttctggtgcaaagagatgcaaatagtactgttcgctttccgcatgccagcgccacgcactaccgccaaattttgaacgccagttgttcggtggcgtttctggttcgccatcgcgccagatataaaactggcggtaagggctttctttgttcagcgcctcgcgaaaccaggcatgttgggtagaggtatggttaaacaccatatcgagaatgatacgaatcccgcgcgattttgcctgcgtcaccagttcgtcaaaatcgtccagcgtgccgtaggtgggatcaatcgccgtatagttcgctacatcgtaaccgttatcgacctggggagagacataaaagggggttagccagatggcatcaacgcccagtttatgcagatagtccaggcgttggataacgccacgtaaatcgccggtgccgctacccgtggtgtcctgaaaactctttggataaatctggtagataacgccgttttgccaccagtggggaagattagtcattacgttattcctgcaaatgcgagggggcgcaattgcgccccgaagaaaattaaacaatgtccagcgtgcccaagcggtatttccgctgatagataaacgaggtgagtacaatcgggatgatgatggcgatagccattgccagcgcaaatacctgccagtagctcggttgaatcgagagaattcccggcaggccccctacgccgataccattcgccataacgccgttcaggccgcatagcaatcctgccagaccagaaccaatcatcgcgcacagcatcgggaagcgatatttcaggttgatgccgtacattgcaggctcagtgaccccaagccaggcggagatagcggcaggcacggagatctcgcgttcattgtgcttgcggctggaaatgataatgcctatcacggcggagccctgagcgatattcgacagcgcaatcagcggccacactggcgtgccacccatgctttgaatcatctgcaaatcaatagcaagggtggtctggtgtacgccggtgatcaccagcggcgcgtacaggaagccaaacaatgccgcaccaatcggagcaaagctgccggtcatcaggtgacgtaccgcaaaggcaacgccatcgccaatcatgcgaccaaacggaccaatcagcgcatgggcgaggaacaccgcgaggatcagcgaacagacgggcaccaccaccagatagaggtaatccggtacgatgcgtttaaggcgagtttcaataacgcccagcgccagcccggctaacagtgccgggatcacctgcgcctgatagcccactttggcgatgctgaacatgccaaagtcccacacttccggcagctgctgcccgagcagataagcgttcatcagctggggggaaaccagtgtcacgccaagcacgataccaaggatcggcgtgccgcccatttttttcaccgctgaccagcaaatcccgaccggcaggtagaagaaaatcgcttcaccgatcaaccacagaaaatcgtagatcgtttgcagggaagggtacatttgcgccagcgtctgaccgttgctcatgggcaaatcgccgatcacattgcgaaaaccgaggatcaaaccgccgctaatcaacgcgggcagcaacgggaagaagatctccgcgaaatgagagatcaactgctcatgccatttcatattctgccgggcggctttttttacctgctctttatcaacctgcgcctgtccggttgacgctattagtgcttgatagtaatcacccacgttggtgccaatcaccacctgaaattgcccggcattggtgaaacagcctttcaccatggggagttgctcaatttctttcggtctggcattggccggttggttgaggacaaagcgcaggcgagtaatacagtggctcaccgtcgcaatattgccgcgcccgccgaccagttcaatcaaccgatcgatatccgtttggtttattttgctcatcataaagccccatggcagatgacatttttggttggctgcagaatatattgcgcggaaaaatttaaaaacgggaacgttcccgaaatgcagcgaagatcacaatttatcgttcaggaaacgatcaggacagggtggcggggatgatgatttgttgcggttcgctgcgcccggttacctgtgcgatcaattggcaggccgcctggcgtccagcttcggcgtaaccgggatctacggtgacgatctccggatggaggaatttcattaacggtgtattaccgacgctcgccagttgcaaggtgtcgatgcgttgctcttgcaggtatttacttgcgccaagtgccagcgtgtcggttgcgcacagtaacgcagtagtttcaggcgtaatcacttttgccacgttctcatagccttgcttcatagcaagccctggcagagcggcaacgggatgcagtttatgcgctttgcagaacgccaggtaggcttcgtgacgtcgcttaccggttgtcacgtcactatgcggcacgccgagataactgatattacgatgcccctggtcatacagccgttgcatcaggatcttgattgccccttcgtcgtcataacagaccgaagcaaagccttttgcgtcacgcgccagcagaaccagcgatgactgccagtgggctaacatttcttctgttatgccagtaaaaccgaacagcactacgccgtcgatattacgccgtttcagcacccccaaatgttcggcaactaattgcggggaaaactggctttccatcatgattgggtcgtaaccttgttcatagaacgctggcagcatggtttgaacggcgagattttctgacaacgaatccagacgggtaacaatgatggcgaccactttatcgctttgcccacgcatagcgcgcgcagagcgggaaggggaaaatccatgctgattcatcactgcttcaacacgctcgcgggtgcgctggctcacgccgctttcgttattcagcacccgggaaactgtagatttccccacgccgcttaagcgtgcgatgtctttgatagtcagccgattttgcatcctgttgtcctgtaacgtgttgtttaattatttgagcctaactttacccgtgcattcagcaatgggtaaagtctggtttatcgttggtttagttgccagcaagtattatatcgccataaatgctacgaatattattggattctccttattatttgcggcgcttttttcacttaccggaggttatatggaacctgatcccacgcctctccctcgacggagattaaaacttttccggtaagcccgtcttttcacggcgctaccggatgcgtaaggccgtgacgttttaacgtccctgctcagctttattaccttcaggtaaggcttcgccacgcctgaagacatttctgtactgtttcagacagtgcggagggactccttatgtttaaagaaatttttacccggctcattcgccatttaccttcccgtctggttcatcgcgatccattgcctggcgcgcagcagacagtgaatacggcggtcccgccgtccttaagtgcgcattgcctgaaaatggcggtgatgcccgaagaagaattgtggaaaacgttcgacacccatccggaagggttaaatcaggcggaagtggaatctgcccgcgaacaacatggtgaaaataaattacccgcacaacaaccgtcgccgtggtgggtacatttatgggtctgctatcgcaacccatttaatattttactcaccattctcggcgctatttcttacgccactgaagatttatttgccgcgggcgttatcgcgctaatggtcgctatttctacgttgctgaactttattcaggaagcacgttccactaaagcggcagatgccctgaaagcgatggtcagcaataccgcgacggtgctgcgcgtaattaacgacaaaggcgaaaatggctggctggagatcccgatcgaccagctggtgcccggcgatattataaaactggcggcgggggatatgatcccggcagatttacgtatcttgcaggcgcgggatctgttcgtcgctcaggcgtcgttaaccggtgagtctctgcccgtggaaaaagccgctaccactcgccagccggagcacagcaatccgctggagtgtgacaccctgtgttttatgggcaccaccgtggtgagcggcacggcacaagcaatggtgattgctacaggagccaacacctggtttggtcaactggcggggcgtgttagtgagcaggaaagcgagccgaatgcctttcagcaggggatcagccgcgtcagtatgctgctgattcgctttatgctggtgatggctccggtggtgttgcttatcaacggttacaccaaaggcgactggtgggaagcggcactgtttgcgctttcggtcgcggtaggcttaacgccggaaatgttgccgatgattgttacctcgacgctggcgcgcggcgcagtaaagctgtcgaaacagaaagtgatcgtcaaacatctggatgctattcagaactttggcgcaatggatattctgtgcactgataaaactggcaccctgacacaggacaaaattgtgctggagaatcataccgatatctccggtaaaaccagcgaacgcgtgctgcatagcgcgtggttgaacagtcattatcagaccggacttaaaaacctactcgatacagcggtgctcgaaggtacggatgaagagtcagcgcgctctctggccagccgttggcaaaaaattgatgagattccgtttgatttcgagcgtcgccggatgtcggtggtagtggcagaaaataccgagcaccatcagctggtttgcaaaggtgcattgcaggaaatcctcaatgtgtgttcgcaggtgcgtcacaatggcgagattgtgccgctcgatgacatcatgctgcgtaagattaagcgggttactgatacgctgaatcgtcaggggctgcgcgtggttgcggtggcgacgaaatacctgccagcgcgtgaaggagattaccagcgggcggatgaatccgacctgatcctagaaggatatattgctttccttgatccgccaaaagagacaactgctccggcactgaaggcattaaaagcgagtggaattaccgtaaaaatccttactggcgacagtgagttagttgcagcgaaagtgtgccatgaagtggggctggacgcgggagaggtggtcattggtagtgatattgaaacgctatctgacgacgaactggcaaatctcgcacagcgcaccacgctgtttgctcgtctgacgccgatgcataaagaacgcattgtgaccttactgaagcgcgaagggcatgtggttggctttatgggcgatggtattaatgatgcgcccgccttacgcgctgcggatatcggcatttctgtggacggcgcggtagatattgcccgtgaagcggctgatatcatcctgctggaaaaaagcctgatggtgctggaagagggggttattgaaggacgtcgcactttcgccaacatgctgaaatacatcaaaatgacggcgagctccaacttcggtaatgtgttcagcgtgctggtggcgagtgctttcttgcccttcctgccgatgttgccgttacacttgcttattcagaacctgctgtatgatgtgtcacaggtggcgatcccgtttgataacgtcgacgacgagcaaattcaaaagccgcagcgttggaatccggcggatctggggcgctttatgatcttcttcggaccgatcagctcgatcttcgatattctgacgttttgcctgatgtggtgggtattccatgccaacacgccggaaacgcaaacgctgttccagtcgggatggtttgtggtgggcttgctgtcgcaaacgctgattgtgcatatgatccgcacccgccgtgtgccgtttattcagagctgtgcatcgtggccgttaatgatcatgaccgtgatcgtgatgattgtcgggatcgcattgccgttttcaccgctggccagttatctgcaactgcaggcgctgccgttaagctatttcccgtggctggttgcgattctggcagggtatatgacgttaacccaactggtgaaaggattttatagccgtcgttacggctggcaataaagaatcaactgggcatggtggcctggattcagattgcagacaaagtgagttttgttcatgccggatgcggcgtaaatgccttatccggccaacaaattcaataaattgcaggaatcacgtaggcctgataagcgtagcgcatcaggcgattttgtgtttgtcatcagacttaatccgggcatgatagcccggatttccatcaagattagcgacgaacagcgatcgcttcgatctcaattttcacgtctttcggcagacgggcaacttcaacgcaagaacgtgccgggaaggtggcattgtgttcggtgaagaaggcttcgtaggtagcattaacggttgcgaagtcgttcagatctttcacaaacacggtggttttaacgatgtcgcccactttcaggccagcggcttcgacgatcgcttttacgttatccagcgactgacgtgcctgtgcagcgacgtctgccggtacttcgcccgttttcggatttaccgggatctgaccggaggtgatgatcatattgcccagatcaacgccctgtacgtaaggaccgatagctgccggtgcattttccgtcgcgatagttttgctcatgatttctcctttattacagcggtaaaaagtctggctcattatagggagccagacttttattaccaaccgcaattaattggccagcaccacattatgggaaaactctttttcacagtatttgcatttgagcgcgatgtcattggcgcgttttcgcacggcaaagctggaagaaaccggttcggcatggctgatacagttgctgttcgggcagaccagcacattgtcgatgcgctccggcagactggggcgtgatttacccaccacttcatagttgtcgatacggttaaccgtggcttgcggcgcatacaatgccagttgatctacctgatcttcactcaaaaaggtattttcgattttgatcagatctttgcggcccatctcgccagaaggcaggttcagaccaatggtgatgcgctgatccgtttcggtcagcttgaacagactcaacagcttaaaaccgatctgggcggggatatggtcaattaccgtgccgcgtttaatagcttcaacctgcaatttattatcgtgtgtcatctctatttccccttacagtaccagatcgcgattcagaaccagtgccagtaacgcctggcgagcgaaaatcccgttgcctgcctgctggaagtaccaggcgtgtggcgttttatcaacatccgtcgcaatctcatcaacacgcggcagcggatgcagcactttcatattggctttggcgttgtggagatcgctggcgcgaagaacaaactgcgctttcacgttggcgtactcggacgggtccagacgctctttttgcacgcgggtcatgtacaggatgtctacttccgccatcacttcttcaatagagctgtgcagactccaggcgatccctttttcatcaagcatatccagaatgtattgcggcattgccagcgcgtccggcgcgatgaagtaaaaacggttgccgtcgaacttcgctaacgcctgagtcagggagtgaacggtgcggccatatttcaggtcaccaaccattgcgacgtggagattgtccagacgcccctgggtttcctgaatagtgaataagtccagcaaggtttgcgtcggatgttggttggagccatcaccggcattcagtaccggtacattgccggaaaactcggtggccaggcgcgccgcaccttcctgcggatgacgcatcactatcgcatcgacgtaagtgctgataaccgaaatggtatcggccagcgtttcgccctttttacccagtgatgtattggcgctgtcggagaagcccaccacgctggcacccaggcggtgcatggaagtttcgaaagagaggcgggtacgggtagaggcttcgaagaaacagctggcaatgactttgtgcttcaacagctctggttgcgggtttgctttcagtttcgccgctgtcgccagcaccagattaaggtcatcgcgactaaggtcgtttatggaaatgatatgtttctgatatagcggattagccatcttttatctcctgacgcctgggcaaaaaaaagcccctcgattgaggggctgggaatgggtgatcaacgggaagaaaaacggcaggccagcgtcttttttcagacgcggtaagacaaaatgtcgaacacactgaaccatacatcctcccggcaaattgtccggcattatactcatcgtcagaagcggtgcaagcatttgatgcaatattttgtcagcgcaaacggtttatttgaattataagtcaaaatacatgcatttttatttgttgtgattctgcaggggaacggtcgttcggtatcaataattgcagacatttcctgctttttcctttttcactttcacgcaatcagatatgcattttattccattcatccgacttatagggcggagtgtgaaaacgaacggctaacactattgcttactgctcagggatgcgcgctatcactttaatttcaaaatcaaagcctgccagccatgtaacacctaccgccgtccagtttggataaggtggggcgctaaatatttcatttttcaccgtcatgatgtcttcaaattggttttctggatcggtatggaagctcgtaacatcaatgatatcgtcaaaagtgcatcccgcagcagccagggtcgcatgcaaattatcaaatgccagtctgacttgttgctgaaaatcgggttctggtgttccgtcctctcgacttcctacttgcccggaaacaaacagcaaatcgccggaacgaatagccgcagaataacgatgttcagcatacagtgaatgtcggcctgcagggaaaacagcggttctttctaccatttggttatcctcaagatttacgacatgaacagaagatttatatttaccaggagccgcttttagcggacgacgtgagtaaacaaaacccagacatcatgggaaatggctgggcttaattgagcgtagtcggttatgcgccaaacgcgccatcaatggtatgcatcgcgccggtaacaaaactggcttctggccctgctaaccatgcgaccataccagcgacctcttccggttgcccatgtcttttgatagccataaaactatgcaacatatcgcgcattggcccgttggcgggattagcgtcggtatcaattggccctggctggacgacgttgatggtgatcccacgcggtccgaaatcacgggccagctcgcgcgccatgccttgcagggcagatttactggcggcataagcagccatgcctgcaacaggcatacgatcgccattcacggagccgatgattaagatgcgcccgccttcgggcatctgccgggcggcttcaacagaggcatgataaggagcatgaatattgattttgaaaaggcgatcaatatcgtcggcattcaattccagggcatcgccaaagacgccaatacctgcatttaccaccaggatatccaatgcgccgctcttacgaacgacatcaatgacagcgtctctgtcagcactatctgtgaatactgctgtcgctccagtcttttgtgccaggtgttcagcggcatctttcgaccccgcataggtgaatcgtacattggccccatcggtgacgaaacgacgtacgatagcggcaccgataccacgactgccaccgaggatgagaactgtcttacctgtaaaagcgcccataaggactccttgatttattatgtaacatgcattacaaaactgttttaactttctgtcaacaagttttgtaatggtcactaaaaaacaatctcgcgttccaggtcgtcccagacgtttcgctcctgagcaggcagtctctgcggcaaaagtgctttttcaccaaaaaggtttcgatgctgtcagtgttgctgaagttactgattatcttggtattaaccccccgagcctctacgcggcttttggcagtaaggctgggttatttagccgtgtactcaatgaatatgtcggtacggaagctattccgcttgccgatattcttcgtgatgatcgtccggtaggggagtgcctggctgaggtattaaaagaagcggcgcgcagatatagccaaaacggcggctgcgctggctgtatggttcttgaaggcattcatagtcatgatccacaagcgcgtgatattgccgttcaatattatcacgccgcagaaacggccatttatgactatatcgccaggcggcatccacaaagcgcacaatgtgtgactgattttatgagtaccgtgatgtcagggctttctgcgaaggctcgggaggggcactccatcgaacaactctgtgcaacagctgcactggcgggggaagcgataaaaactattctcaaggagtgatgcgggccttgacccgaaaggcgggaacgcgcctgccgataagttgtgataagacaataattcacgcattaaggctagcggaattgatcatcttttcgtataacgatggaaatgaaacattgttttaattaaggagtggaaaagatgatcatcggaaatattcataatcttcagccgtggctaccccaggagttacgcctggcgattgagcatatcaaagcacacgttacggcagaaacgccaaagggcaagcacgatatcgaaggcaatcgtctgttttatcggtgatgctgccaacttactgatttagtgtatgatggtgtttttgaggtgctccagtggcttctgtttctatcagctgtccctcctgttcagctactgacggggtggtgcgtaacggcaaaagcactgccggacatcagcgctatctctgctctcactgccgtaaaacatggcaactgcagttcacttacaccgcttctcaacccggtacgcaccagaaaatcattgatatggccatgaatggcgttggatgccgggcaactgcacgcattatgggcgttggcctcaacacgattttacgtcacttaaaaaactcaggccgcagtcggtaacctcgcgcatacagccgggcagtgacgtcatcgtctgcgcggaaatggacgaacagtggggctatgtcggggctaaatcgcgccagcgctggctgttttacgcgtatgacagtctccggaagacggttgttgcgcacgtattcggtgaacgcactatggcgacgctggggcgtcttatgagcctgctgtcaccctttgacgtggtgatatggatgacggatggctggccgctgtatgaatcccgcctgaagggaaagctgcacgtaatcagcaagcgatatacgcagcgaattgagcggcataacctgaatctgaggcagcacctggcacggctgggacggaagtcgctgtcgttctcaaaatcggtggagctgcatgacaaagtcatcgggcattatctgaacataaaacactatcaataagttggagtcattacctgttttatcttatctcggaagatatgaccgagccgcacgaagctcgccgtacggagtaccatgcccgctatctcgacattcagattgtgttaaaaggtcaggaaggcatgaccttcagcacgcaacctgcaggcacgccggataccgactggttagctgataaagacatcgcatttttgccggaaggcgttgatgagaaaacagttatccttaatgaaggtgattttgttgtgttttatccgggggaagtgcataaaccgctgtgcgcagtgggtgcaccagcccaggttcgcaaagcagtagtgaagatgctgatggcgtgatgacttttcgccgtaaataactccaggtttacggcgagtttgtgaaaagagcgttttttgatatttttttgtgagtaaaatttgtaatgcttagacgttcttattaactcaaggagttcgtcatgagcaaaatatcagatttgaattattctcaacacattacattagccgacaattttaaacaaaaaagtgaagttttaaatacctggcgtgttggaatgaataattttgcccgtaatgccgaggggcaggataacacaagaaatatccttgatcctaagacatttttggaatttttggtaaaaatatttactctaggttatgtggattttagcaaacgctccaacgaagcgggaagaaatatgatggctcatattgagtcctcatcttatatcaaaaataatgatggcagtgagataatgaagtttgttatgaataatcctgaaggggaacgagcggatttatctaaggtggaaatagaaatcacactttccgctttcactactatggggactcgtcaaggacatacggctattatatttcaacaacctgatggttcgactaatcgttatgaaggaaagtcctttgaaagaaaagatgagagttcattacacctgattactaacaagattctggcatgttaccaacgcgaagctaacaaggaaatagctcgtctattaaatattccgcaggagttaaataattctcaggacttgaataactcgcaggtgagttgtaaagattcagttgattctacgattacggatttaggtaatgactccaacttattgatagtgttttatgttcagataatgcccgatgactttgtcatgcagctccaccgattttgagaacgacagcgacttccgtcccagccgtgccaggtgctgcctcagattcaggttatgccgctcaattcgctgcgtatatcgcttgctgattacgtgcagctttcccttcaggcgggattcatacagcggccagccatccgtcatccatatcaccacgtcaaagggtgacagcaggctcataagacgccccagcgtcgccatagtgcgttcaccgaatacgtgcgcaacaaccgtcttccggagactgtcatacgcgtaaaacagcgagcgctggcgcgatttagccccgacatagccccactgttcgtccatttccgcgcagacgatgacgtcactgcccggctgtatgcgcgaggttaccgactgcggcctgagttttttaagtgacgtaaaatcgtgttgaggccaacgcccataatgcgtgcagttgcccggcatccaacgccattcatggccatatcaatgattttctggtgcgtaccgggttgagaagcggtgtaagtgaactgcagttgccatgttttacggcagtgagagcagagatagcgctgatgtccggcagtgcttttgccgttacgcaccaccccgtcagtagctgaacaggagggacagctgatagaaacagaagccactggagcacctcaaaaacaccatcatacactaaatcagtaagttggcagcatcaccacggatttattagaaaaaccattgaacaatgcattattagcaataaggaaagaacatctgctattaatgccttatgtatgtaatgaatcgatttcatacttgcttggtgaaaaagggatactgaaagaaatagatgaccttaacgcagtaaataattatcttcttaataataagaaagctactgacaatgaaattaatgacatcaaagttaacctgtctcatattcttattgattccttagatgatgcaaaagttaaccttacaccggtcatcgattcgattctggagacttttttaaaatccccatatattaatgatgtaagaatactggattggtgttttaataaaagaatgcaatattttggtgattctgaaaagataaagtatgcatgctccgtgataaatcatattgattttagctgcgatcaatctaaagattttagctgcgatcaatctaaaattaaaatagctgagaccttatttttcaatctcgataaagaaccctataaaaatagccgtaaattacaggaattgatttgggataagttggttgcatatgtcaatgattttagcttaagcaatcaagaaaaatcacgcttaatactaaggttatttgatgatgttaagttactatttaatgaagtgcctgtcagcattttagtaaatgatatttttttgaaggattttttcatgaagcaacctgattttgctaagtggtacttctatcaattacttaagtgttatgagggcgaacagctgtatcttaatgagttaggatatgtttatggtgatgaagaaaaaacaaaagaaattgtaaataaacttccgggttatgtcgttaagatttttgaagaaaagatgggtaatgaattaaaaattagaacaagaatgatgaaaatcctccggaatggcaaaatcaatatatatggatatattaatgaagaacagttaggaaaattaaatcctccggaagatttacgtatagcaataaaaaaattggggtggaataattgaactatcactgcataaaataatgtgacgccgggatgtttttgtatttcccggcatctttatagcgatatcaattatttactgagcgtcgcgaccatcaccgctttgatggtatgcatgcggttttccgcctgatcaaatacaatgctggcggcagattcgaagacctcatcagtcacttccattccgccatgtaggccaaactcttccgccatttttttgccaagcgtcgtttggtcgtcatgaaacgcgggcaggcagtggaggaatttgacctccgggttaccggtcaactgcatcatcttgctgttcacttgataatcacgcagcaatgcaatgcgttcagcccatttctcttttgcttcacccatcgacacccatacatcggtatagataaagtcagcaccttcaactcctttagctacatcttccgtcagcgtaatattcccgccattttgttgtgccagggcgcggcattccgtaaccagcgcagcttccggccagcatgcctgtggcgcgaccagacgcaaatccagaccggtaagcgctgcagcttcgagcatcgaattgcccatgttgttacgtgcgtcacctgcatagactagcgtcatttcgttgaacgttttgccgggcaaatgctcctgcatggtgaggagatccgccagcagctgcgtggggtgaaactcattggtcaggccgttccataccggcacgccagcgtattccgccagtgtttcgacaatctcctgaccatagccgcgatactgaataccgtcatacatgcgaccaagcacgcgggcagtgtctttaatcgactctttatgaccaatttggctgccgcttgggccgagataagtaacacgagccccctggtcatatgcggcaacttcgaaagagcatcgggtacgggtcgagtctttttcgaagatgagcgcgatgtttttaccagtgagtttggcttcttctttaccgcttttcttatcggctttcagcttcgcggctaactgcagcaggctgttgagttcagctggcgtgaaatcgagtaatttcaggaaatgcttatgataaaacccggacataggtccctcctgtggctaacgccttaatgaattaaaattcaatttatatggatgattattcatttgcaagtctaaagcataaatctttatcacaaaggtggaggcaatgtcagtggtgtgtgacaataagagtatcggcaggacattaagaggaatgagccatggcaaacccggaacaactggaagaacagcgtgaagaaacacgtttgattattgaagaattactggaagatggcagcgatccggacgcgttgtacaccatcgaacaccatctttccgcagacgatctggaaactctggaaaaagcggcagttgaagcgtttaaactcggttacgaagtgaccgatccagaagagctggaagttgaagatggtgatatcgtgatttgctgcgacatcctcagcgagtgcgcgttgaatgccgatctgatcgatgcccaggttgaacaactgatgacgctggcggagaaatttgacgttgagtacgacggttggggcacttactttgaagatcctaacggcgaagatggcgacgatgaagattttgtcgatgaagacgatgacggggttcgccactaattaattgattaaaatgcccgatagcacatactagcgggcatttttttagagttcgcgtagcatccgcacttcacaatcgacatggcccgtgcagccaagcgcatagtcgatatgctcaaagcccaaatgctcataaagcgcaatggcttcctttaaaaaagcggtcgtttccagatagcagcgtttgaagcccatctctcgtgcctgctccatcgccattaaggccagttttttcgctagccctttaccgcgaatagccggaagaaaatacatcttttgcagttcgcaaatgtccgactcactcccggttaatggcgcaatcccaccgccgccgaccacttcaccctcgtactcaaccacccaatatgcatggccaggctgactatacacttgatacagctcgtcaagattcggatcggcgacggtgtagcctttatcagcggtaagaccgtattcggcggatacctgacgaatgacgcgggcgatagcaggattatccagcagcgtcaggcgacgcattacaggtgattgcggcgcaatgttattcatagtttaacccggtaatgactccaacttattgatagtgttttatgttcagataatgcccgatgactttgtcatgcagctccaccgattttgagaacgacagcgacttccgtcccagccgtgccaggtgctgcctcagattcaggttatgccgctcaattcgctgcgtatatcgcttgctgattacgtgcagctttcccttcaggcgggattcatacagcggccagccatccgtcatccatatcaccacgtcaaagggtgacagcaggctcataagacgccccagcgtcgccatagtgcgttcaccgaatacgtgcgcaacaaccgtcttctggagactgtcatacgcgtaaaacagcgagcgctggcgcgatttagccccgacatagccccactgttcgtccatttccgcgcagacgatgacgtcactgcccggctgtatgtgtcagcgccagtgatataagacggtaattcgccatttggattgtccgctccacccaacatgttgtttccttaaggttctcacaccagaaaggacatcaacatgctgagcagagaggacttttacatgataaagcaaatgcgccagcagggcgcgtacatcgtcgatattgcgactcagattggttgctctgaacggacggtcagacgctacctcaaataccctgaaccgccagccagaaagacccgccacaaaatggttaagctgaaaccgtttatggattacatcgacatgcgcctggcagagaatgtctggaatagcgaggttatcttcgcggagattaaggcaatgggttatacgggcggacgttccatgctgcgttactacatccagcccaaacgtaaaatgcgtccgtcaaaaagaacagttcgcttcgaaactcagcctggataccagctccagcatgactggggcgaagttgaggtggaggttgccgggcaacggtgcaaagttaactttgcggttaatacgctggggttctcccgcagcttccatgtcttcgccgcaccaaaacaggatgctgagcatacctacgaatcactggttcgcgccttccgctacttcggtggttgtgtgaaaacggtgctggttgataaccagaaggctgcggtgctgaagaataacaacgggaaagtcgtgttcaactccggattcctgttgctggctgaccactataacttcctgccacgggcatgccgtccacgcagggccagaacaaaaggtaaggttgagcggatggtgaaatacctcaaggagaacttcttcgtccggtaccgcaggttcgacagcttcactcatgtcaatcaacaactggagcaatggatagccgatgtggctgacaaacgggagcttcgccagttcaaagaaacgccggaacagcgcttcgcgctggagcaggaacatctgcagccgttaccggatacagacttcgataccagttacttcgatatccgccatgtgtcctgggacagctatatcgaggttggtggtaatcgttacagcgttcccgaagcgctgtgtggtcagccggtatcgatacgaatatcgctggatgacgagttgcggatctacagtaatgagaaactggtggcctcacatcgcctctgttcagcatcgtctggctggcagacagtgccggagcatcacgccccgctctggcagcaggtcagtcaggtggaacatcgaccactgagtgcctatgaggagctgttgtgatgcatgaactggaagtcctgctgagtcgcctgaaaatggagcatctgagttatcacgttgaaagcctgctggaacaggcagctaaaaaagagctgaactaccgggagttcctgtgcatggcgctacagcaggaatggaacggcaggcatcagcgcggtatggagtccaggctgaagcaggctcgtctgccgtgggtcaaaacgctggagcagttcgactttaccttccagccgggcatcgaccgtaaggttgtccgggaactggctggtctggcgttcgtggagcgcagcgaaaacgtgatcctgctgggccctcctggtgtcggaaaaactcatctggccatagctcttggcgtgaaagcgatggatgcgggacatcgggtactgtttatgccactggacagactgatcgcgacactgatgaaagcgaaacaggaaaaccggctggagcgtcagctacagcaactgagttatgcccgggtgttgatcctggatgaaataggctatctgccgatgaacagagaggaagccagtctgttcttccggctactgaaccgtcgatatgaaaaagcgagcatcatactgacgtcaaacaaagggttcgcagactggggagaaatgttcggagatcacgtactggcaacagcgatcctggatcggctgctacatcactcaaccacgctgaatatcaaaggagagagttaccggttaaaagagaaacgtaaagctggagtgctgaccaaaaacacaacgccaatcagtgatgatgaaatggtggaaagcggacagcatcagtaacgaaagtatttagcgggcatgaaaatggcaaataacggtcaaacatcgtggcgttgacatatgcgcgaggttaccgactgcggcctgagttttttaagtgacgtaaaatcgtgttgaggccaacgcccataatgcgtgcagttgcccggcatccaacgccattcatggccatatcaatgattttctggtgcgtaccgggttgagaagcggtgtaagtgaactgcagttgccatgttttacggcagtgagagcagagatagcgctgatgtccggcagtgcttttgccgttacgcaccaccccgtcagtagctgaacaggagggacagctgatagaaacagaagccactggagcacctcaaaaacaccatcatacactaaatcagtaagttggcagcatcaccacgtggcagaacattttactgtctgtatatataaattatatcaatggattttttaattcagggaacttttatggctcaagttattaatgatatggatgttccgtcccattcgtttgtttttcatggtacaggtgagagatattttcttatttgtgtggtgaatgtgttgttaacgattataacgctaggtatctatttaccatgggcattaatgaaatgtaagcgttatctctatgctaatatggaagttaacggacaacgattttcttatgggattaccggtgggaatgtttttgttagttgtcttgtttttgtttttttctatttcgcaatcttaatgacagtgtcagcagatatgccgcttattggctgtgttttgactttgtcactgttggttttgcttatatttatggcagcaaaaggactgcgttatcaggccttgatgaccagtctcaacggcgtaagatttagttttaattgctctatgaaagggttctggtgggtgacctttttcttgccgattttaatggcccttgggatggggactgttttctttatctcgacaaagatgctacatgccaatagttcaagtagcgttattatatctgtggttctgatgacaatagtttgtattgttttcattggtatttttaatggcactttatatagtctggtaatgagttttctctggagtaataccagtttcggtatacatcgtttcaaggtgaaattagatactacatattgtataaaatatgccattctcgcatttttggctttattaccttttctcgctgttgctggttatattatcttcgatcaaatattaaatgagtatgatagttctgggtatgcaaatgatgatattgagaatttacagcaatttatggaaatgcaacgtaaaatgataatcgcgcagttaatctattattttgggattgctgttagcaccagttatttaacggtgtcgttgcgaaatcattttatgagcaacctgtcactgaatgatgggcgtattcgttttcgctcaactttaacataccacggtatgctttatcgcatgtgtgcgttggtggtgatatccgggattacgggcggtctggcttatccactgctgaaaatatggatgattgactggcaggcaaaaaatacgtatttgctgggcgatttggatgaccttcctttaatcaataaagaagaacaaccagataaaggattcttagccagtatttcacggggaattatgccttctttaccatttctgtaagagataaaaaaggccggagcatgctccggccttcgttttcatcactgtgttttgattacagcgcggcgataacagcctgctgttcaatcagtttcgctttcgcttccgcatagccttccagcttctcacgctctttcgcgatgaccgcttccggtgcgcgggcgacaaagccttcattcgccagcttgttctcgatacggctgatttcgccttcgatcttcgccacttctttcgccagacgcgccagctcatcttctttgttgatgaggccagccatcgggatcagcagctctgcgccgtcgatgatcttcgtaacggaaaccggacctttgtcatcggcaggcagcacggtgatgctttccagacgcgccagggtttgcaggaagccacggttttcatttacgcgacgttctgcatccgcgctgcaaccacgcagcagcagctccagcggtttgcccggcgcgatattcatttctgcacggatgttacgtaccgcaacgatcgcctgtttcagccattcggtgtcggccagtgcggcttcatcaacctgagatgcatcgtactgcgggaacggctgcagcatgatggtgtcggcagtgataccgcaaagtactttcacacgctgccagatggtttcggtgatgaacggaatgatcggatgcgcgaggcgcagcagaccttccagtacggtcaccagcgtatggcgagtaccgcgcagttcggcttcggtgccaccgttcattaccggcttagtcagctccagataccagtcacagaactggttccaggtgaactcatacagaatgcctgcagcgatatcgaagcggaagctgtccagcgcttcgcggtacgctttgatggtctggttgaactctgccagaatccagcggtccgccagcgacagcgtcatttcaccaccgttgaagccgcaatcctgaccttccgtgttcatcagcacaaagcggctggcgttccacagcttgttacagaagttacggtaaccttccaggcgcttcatatcccagttgatgtcacgaccggtagacgccagcgccgccagggtgaagcgcagggcatcggtgccgtgcggctcaataccgttcgggaactgcttctcggtgcgcttacggattttgtccgccagctgcggctgcatcatattgccggtacgtttctccagcagttccggcagcgaaataccgtcaaccatatccagcgggtcaataacgttacccttggatttggacatcttctggccttcgtcgtcacgaatcaggccggtcatgtaaacggtgtggaacggcacctgcggtttgccattttcatctttgatgaagtgcatggtcatcatgatcatgcgggcaatccagaagaaaatgatgtcgaagccggataccatcacgctggttgggtggaactggcgcagtgcgtcagtgttttccggccagcctagggtagagaaggtccacagcgcagaagagaaccaggtgtcgagaacgtcttcgtcctgacgcagggcaacgtcggcaccgaggttattttccttgcgcacttcttcttcgttgcggccaacataaacgttacctgcttcgtcgtaccatgcagggatacggtgaccccaccacagctgacgagagatacaccagtcctgaatatcgcgcatccaggagaagtacatgttttcgtactgcttcggtacgaactgaatgtcgccgttctcaaccgcttcaaccgccggtttcgccagtacatcggcacgcacgtaccactggtcggtcagcattggttcgataactacgccgccacggtcgccgtaaggaacggtcaggtcgtgcggtttaatttcttccagcaggccgagtgcgtcaaccgcagcaacgactgctttacgtgcagcaaaacgctcgagtttctggaactctgccgggatttcgctggaataaacgtcagattcgttacctttggtatcgaacacctgggcgctttcacggatatcgccgtcaaaggtcaggatgttgatcatcggcagcgcgtgacgtttacccacttcatagtcgttaaagtcgtgcgccggagtgattttcacgcagccggtgcctttttccatgtcggcgtgttcgtcgccaacgatcggaatacgacggttaaccagcggtagaatgacatatttgccaatcaggtctttgtaacgcggatcttccgggttaacggccacgccggtatcgcccaacagggtttccggacgggtagtcgcaaccaccagataatctttaccgtctgcggttttcgcgccgtcagccagcggatagcggatgtgccacatcgaacctttcgattcgcggttttccacttccaggtcagagatagcggtgcgcagtttcggatcccagtttaccaggcgtttgccacggtaaatcaggtcttctttatacagacgaacgaaaacttctttcaccgcattggacaggccttcgtccatcgtgaagcgttcacgctcccagtcgacagagttgccgagacggcgcatctgacgggtaatggtgccgccggactccgctttccattcccagattttgtcgatgaaagcttcgcggccgtagtcgtgacgggttttaccttcttctgcggcaatcttgcgctcaacgaccatctgggtagcgatcccggcgtggtcagtaccgacctgccatagggtgtttttgccctgcatgcgctgatagcggatcatggtatccatgatggtttgctggaaggcgtgacccatatgcaaactgccggtgacgttcggcggcgggatcatgatgcagaaactttcctggctttcatcgccattaggcttaaagtagccctgcttttcccagtgctcgtaaagcggctgttcgatatcttgtgggttatatgtcttttccattatttccaggttgccgtattcaggttgaaaccagccacgcggtaggctttatagcgttcgcgcgccagttgtttcagagaatcttcataaggaacgaagtctaccacttctgtgaaagcagtggcaaaatctgcaaagcttgttcgcagactaatcaatatatcgcgcgggctgctgctgcgtttttgcggccaggcgatctccaccggcgcaccgccgcgcggtccttctcccgctaaattatgcgggacaaagctttctgccggacgcgcccacagggcttcatccagccggtaagcctgcttttcatcttcacaggcgatgagcacgcgcttaccgctgcgccaacgttctgcggcaatttcacacaccagttgctcaacggcgcttaagccatcgacggtggtgtcattgtccagaaggtagaacgttgcgtttttcatatatggggcttcttgtggtggatttaaatattgctgcattcctcaccctgaaagatgagcaatgaatttctattgcgctcgatcggttccctctcccttagggagagggttagggtgagggtaaaacgcaaacttactcttcgccgttaaacccagcgcggtttaacaggaactgtgccagcaacgctaccggacgaccggttgcgccttttgctttaccagaacgccaggcggttcctgcaatatccaggtgcgcccagttgtacttacgggtaaagcgtgacaggaagcaacctgcggtaatcgccccaccaggacgaccgccaatgttcgccatatcggcaaaattggactccagttgttcctgatactcgtcacccagcggtaagcgccatgcgcggtcaccggattgttcagacgcggcaatcagttcatgggccagcggattatggttcgccatcagaccagtaatatgatgacccagcgcgatcacgcaggcaccggtcagcgtcgccacatcaatcaccgcttccggctcaaaacgttcaacgtaagttaacacgtcgcacagtaccaggcggccttcggcatcggtgttcagcacttcaacggtttgaccggacatggtggttaacacatcgcccggacgataggcacgcccgccaggcatgttttcacagcctgccagcacgccaataacgttaataggcagttgtagctctgcgaccatccgcatcacgccgtaaaccgctgccgcaccgcacatatcgtacttcatctcatccatgccttctgaaggcttgatggagataccgccggagtcgaaggttaaacctttacccaccagcacgattgggcgtgcatcttccgacgcgttgcctttgtactcaatcaccgacatcagcgattcgttttgcgaaccctgaccgaccgccagataagagtgcatccccagctctttcatctgctgttcgccgataacgcgggtgataacattcttgctgtagctgtcagccagctggcgcgcttgtgaagcgaggtaagcggcgttacagatattcggcggcatattgccgagatcttttgctgctttaatcccggcggcaatcgccagaccgtgctggatcgcgcgctcaccgctggtcagttcacggcgggtcggcacgttgaacaccattttacgcagcggacgacgcggttcgctcttgttcgttttcagctgatcgaaactgtagagcgtctcttttgcagtctcgacagcctgacgcactttccagtagttgttacggcctttaacgtgcagttcagtcagaaagcagaccgcttccattgagccagtatcattcagcgtattaatggttttctgaataacctgcttgtactgacgttcatccagctcacgttctttgccgcaaccaataaggagaattcgctcggaaagtacattcggaacatggtgcagcaacagtgtctgccccggttttccttccagttcgccccgacgtagcagggcgctgatgtacccatcgctgattttatcgagctgttctgcaatcggagaaaggcgacgtggttcgaagacgcccacgacgatgcaggcactccgctgtttctccgggctaccgctttttacactaaactccatgcactacgctcctgaatcttaaagacaacggcggtggctacagatagaattgcaagctttcgtaactcatgtccgctgttgcgatgacttcgtgttaatcttaacgttattacggcattggcacgtcagaacaaaatctgagaggtgaatccgttgagtataattatcttagcgacgatttcgacgactcaagagaataaatgacgtttaagccatgaaacaagctaaaatcctgcaaaagacgagtttttacgggcgtatttaaagtgataatcataagatatctggtgcgggagacgctcaaaagccagctggcgatactcttcatcttgcttttgatcttcttctgtcaaaagttagtgaggatcctcggcgcagcggttgacggcgatattccggcgaatctggtgctctcccttctcgggttgggcgtgccggaaatggcgcagcttatcctgccattaagcctgttcctcgggctgctgatgacgctgggcaaactgtataccgaaagtgaaattacggtaatgcatgcctgcggtctgagcaaagcggtgctggtgaaagcggcaatgatccttgcggtgttcacggcaatcgtcgcggcggttaacgtgatgtgggcgggaccatggtcatcgcgtcatcaggatgaagtgttagcagaagcgaaagcgaaccctggcatggcggcgctggcgcaagggcaattccagcaagcgactaatggcagctcggtgctgttcatcgaaagcgttgacggcagcgatttcaaagatgtgttcctcgcacaaattcgaccaaaaggtaatgcacgtccttctgtggtggtggccgattccggacatttaacccagctgcgcgacggctcccaggtcgtcactctcaaccagggaacgcgcttcgaaggcactgcactgttacgcgatttccgcattacggactttcaggattatcaggcgatcattggtcaccaggcggtggtgctcgacccgaacgataccgaccagatggacatgcgcacattgtggaacactgacaccgatcgtgcccgcgcagaactgaactggcgtatcacgttggtattcaccgtgtttatgatggcacttatggttgtaccgttgagcgtggttaacccgcgtcagggacgcgtactgtcgatgctgccagccatgctgctgtatctacttttcttcctgatccagacctccctgaaatcgaacggcggtaaaggtaagctggacccgacgctgtggatgtggaccgttaacctgatttatctggctttggcgattgttctcaacctttgggacaccgtgccggtccgccgcctgcgcgccagtttttcgcgtaaaggagcggtgtgatgcaaccttttggcgtacttgaccgctatatcggtaaaactattttcaccaccatcatgatgacgctgttcatgctggtgtcgctgtcgggcattatcaagtttgtcgatcagctgaaaaaagccgggcaggggagttacgacgcgttaggcgcaggaatgtataccttgctgagcgtgccgaaagatgtgcaaatcttcttcccgatggcggctctgcttggggcgttgcttggtcttgggatgctggcgcagcgcagcgaactggtggtgatgcaggcttctggttttacccgtatgcaggtggcgctgtcggtgatgaaaaccgccattccgctggtcttgctgacgatggcgattggtgaatgggtcgcgtcgcagggcgagcagatggcgcgtaactaccgtgcgcaggcgatgtacggcggctcgttgctctccactcagcaaggcttatgggcgaaagatggcaacaacttcgtctacattgagcgggttaaaggtgacgaagagttaggtggcatcagtatttatgcctttaacgagaatcgtcgtctgcaatccgtacgttatgccgctaccgcgaagtttgacccggaacataaagtctggcgtctgtcgcaggttgatgaatctgatctgaccaatccgaaacagatcaccggttcgcagacggtgagcggcacctggaaaaccaacctcacgccagacaaactgggcgtggtggcgctggacccggatgcactctccatcagtggtttgcacaactatgtgaagtatctgaagtcgagcggtcaggatgccggacgttatcagctcaacatgtggagcaaaatcttccagccgctatccgtggcggtgatgatgttgatggcgctgtcgttcatctttggcccactgcgtagcgtaccgatgggcgtgcgtgtggtcaccggtatcagcttcggttttgtcttctacgtactggaccagatcttcggcccgctgacgttggtttatggcatcccgccgatcatcggcgcactgttgccaagcgccagcttcttcttaatcagcctgtggctgttaatgagaaaatcgtaatctaacaagggagcgaaagctccctttattattgttgacaaagtcaaatacgagttcgaacggtcccctcgcccctttggggagagggttagggtgaggggcacagatcacgtctgacttacctttttctcccccccagcaaactccccaacatcccgcgtacaatctgattcgtcacctggcgagcggcgcttttcgccattgtttgcaccacaccatctttcttcccgccgcgtggtccggtagtgccaaacaaaatatccttcaatccaccaagaataccgtcatccaccgccacctctttccctttcacggggggattattttgctgctcggtactggcctgaaagcctttttgcagcatctcataggcggactcgcggtccacctcatcttcatatttgccatacaccggggagtgattaatcaggccattacgctcatcttccgtcaccggccccattcgcgaacaaggtgcgatcaccatcgcccgttccaccactgaaggacttcctttcgcatcgagaaacgagattaacgcctcgccggtccccagttcctggattgccttttcggtatcaaacgccggattggcccgcatggtttgcgccgctgccttcactgctttctgatctttaggcgtaaaagcacgcaaagcgtgttgaacgcgattaccgagctgccctagcacgttatccgggatatctgacgggttttgcgaaacgaaccagacgcccacgccttttgagcgaataagccttatcacctgctcaatcttatccagcagtacctgtggcgcatcgttaaacagcagatgtgcttcgtcgaagaaaaacaccagttttggtttctccagatcgcccgcttcaggcaattgttcatataactctgaaagcatccacagcaggctggcggcgtacagtttcggcatctgataaagtttctcggcgctgaggatattgataacgcctttaccgttggcatcggtgcgcatccagtctttgatatccagcatcggctcaccaaagaagtgttctgcgccttgctgttccagcgacagtaatccgcgctggatggcaccaaccgatgcgctactgatatttccgtactgattctggaaggatttggcgttatcgccgatgtactgggtaatcgcccgcaaatctttaaagtcgagcagcaacaatccctgatcgtccgcaatgcggaagataatattcagcacgccagattgcacatcgttgagattcaacagtcgtgccagcaacagcggccccagatccgaaaccgtcgcccgcaccggatggcctttctcgccaaagatatcccacaccaccaccggattggcatgcggttgccagtcgttgacgccgatatttttcagtcttgcgagcagtttttccgacgccgttcctgcctgcgcgatgccggtcagatcgcctttcacatcggccataaacaccggaacaccgatttccgacaatgactctgccagtttttgcaacgtgacagttttacccgtccccgttgcgccagtaatcagcccgtgacggttagccattcccggcagtaaaaacagttctgtgtccggcgtgcgggcaattaacaggggttcgctcatgagatttcctccagtttcctgcctggagtataggcaacgtccggcaaagagaatatgtgtaatgaagagaaaataacctaaagcgtgttaccgtgataaatctgatacccgaggtcaacagtgttgtggttgtgatcgttattcttaatcttgctcagcaacatttgggcggccatccgaccaatatcaaaacggggagtaattacgctggcgaggcttgggatcatttgcctgccaatctccagcccatgaaaacccgcaatggaaatttgttctggcacggcgaggtttcgctcgcggcacagcagaagcgcacccatcgcaatatcgtcattggtgcaaaatacaccgtctaaatccgggtttgcgctaagggcatcacgcattaactgcattcctaaatgaatggatgagatggcgcgtggattcatgcgtaatggggaaagattatgcagcatcatcgcatcgcaatacccctgataacgctgttcatcgcgggtgtcatctttggaaccgagatacagaattttgcgcctgactcgcttatccagcatggtacacaccatgtcaaaagcagcctgccgattatcaaaaccgacctccatatccagccgttctccctgtacatccatcaattccacgaccggaatggtggctgaacgcagaaatttcaccgtcctgatggtgtgatatttttccgaaagaataatcccgtcaatgttataagagagcaggttaatcaccgactcttcttcggaatcgcgatcgtaattgtaattagcaataagggtctgataattatgcacagaggtgacggattctattcccgcgagaatgtcagcgaagagttgattttgaaatgacggaatcaagataccgagggtataactttgtgcattcaacaacatgccgggagcgcgattagggatataattgatctcttccataattttggcgatgcgctcgcctgtttcctttgccacctttttcggcgagcggatataacgactcacggtcatttttgttacgccagccagcgtagcgatatcctgtaaagaaattctgtgattgcgcataacttctcccaacgtcgggggaatcttcaatcttcccccgaaactacatcacaatattttattctttcagtgcaatacggcgttaatggctaacacgcccagcaaacccataatagaaataagggtttccatcactgtccaggtacgcaacgtttcaccaaccgtcagattaaaataccctttaaatagccagaagccagggtcgtttacgtgtgacgcgatcacgctgcccgcaccagttgccagtaccattaaagcgggatcggcatgggtaacgttgataatcggcaacaccacacccgcggtggtaatggccgcgacggtggcagagcccagagcgatacgcaacagcgccgcgacagtccagcacatcaataacggcgaaagcgtagttccggtcattaagtgtgaaatatactgcccgacaccactatctactaatacctgcttaaacgcgccgccgccagcgataataaacacaatcatcgcgatagcgcctatagaatccccaatgatatccatgatttgctcgatggtgcgtccattacgtcggcccagtgtgaaaatcgcaataacaatggcaataaacagcgcaacggcagggttaccgacaaattcaaagaagaggcgcacggtgttagttttcggtaacgtaatttcacaaacggcggcgatagccatcaggatgaccgggatcactgcagcaaaaatactgttccagaaggagggcatctcctcttcgctaaacagatgaggattaaataagccttccggtggtgctttctcaaagcgagttagcagtttagaaaacagcggtcctgcgacaataactgtcggaatggtaatgataaatccatacagtaaagtcgttccgagattagcctcaaagatagtcgcgatggcagtaggccctggatgtggcggcagaaaacagtgggttacagagagcgctgctaccatcggtacgccaacatacaacaggggtaatccagatgatgccacgatggtaaataccaacggcaacagcaggacaaaacccacttcaaaaaacatggcgaggcccacaaccagaccggtgatcactagcgcccattgcacgcgttttttaccaaaagtagcaatcagcgtagtggcgatacgttgtgccgcgcccgtatcagaaatcagcttgcctaacatggccccgaaaccgaggatcattgccagcccgccgagcgtgctgccgataccattttgtatagagtgcaggacggcctgtgcatccatcccttcggcaaatccgacgacggcagctaccagaacgagggcaataaagccgttaactttaaagccgatcatcaggataagaagcagcgcgacgcctgccgcaataatgattaatggcatagtctttatctcttattagtgccagaaaagcagcgctttcgcgctgcacgtagggtggtggctgttaaacagccactaacatgccgccatcaacaaacaacaggtggccgtttacgaaatcagaggcttttgaagaaaggaacaccgcagcaccaatcagttcctgcggatctccccagcgtgcggcgggggtccgtttgcacaaccaggcggtgaaggcttcgtcctcaaccagtgctttagtcatttctgttttgaaatagcccggcgcaataccgttgacctgaatattgtggcgcgccagctcgacgcacatgccgcgggtgagcatttttaccgcccctttcgatgcggcataaggggtgatggtgtcacgtcccagttcgctttgcatcgagcaaatattaataactttacctgccttgcgttcaaccatgtgacgagttaccgcttgcgataccaggaacacggcggtctggtttactgcgatcacatcattccactcttgttcagggaactcagtaaaaggatgacggcgctggataccggcgttattcaccagcacatcaatggggccgatgtccttttcgatatgttcaacggcggcatcaatttcatgtttatgagtaacattaaaaggtgcggcaacggcctgaataccctcctggtggagtttttctacagcaagttctgcgcgttcggcagtaatatcattaataattatttgtgcgccatatttacccaggccggttgccagtaaatagccaatgccctgtgctgaaccggtaatcaagatattttttcctgccagtgaaaatagatcgttcattgtattattcctttatttatctcttagaaaacaagctggacttttgctgcctgggttttatcaccggcgaaacgtagcgcctcttccaggtcagtgaagagatattcagcactcagtaaaggcagtggattgataacgccattcgccagccatgacactgcggtattaaattcgctggtaaaacggaaagagcctttgagtgaaatctccttaccaatcaacgtcatcattgggaattctgccatcgcgcctcccatccctacctgcaccattacgccgcgtgcacgagtgacctccagacaggtattcactgatgaaggatgaccggacacttcaaagctgacatcgaaatggcctttttccgctttccagtgatccatgtcgtcgttttgtgggtttacgagcacatccgcacccatctctttggccagcgaaagggaacggggactcacatcggcacagacaatttccgcggaccccagtgttttcacagcactgacaatcaggcagccaatgggcccaacaccggaaacaaatactcgcttgccctgtaactcgtcggcctgatgtgcggcatgaatcgcgacggctaaaggttcggcaaaagccataaccttttcgtcagctttggccggataagggacacattgcgacgtttcgaccattttataacgggtaaaaccaccatcaacatgagggaaatacatggcactgccaaaaaaacgcatatctgtacactgattctcgttatgttcaatgcagtatttgcagtgaccgcacggtttagacggattaatggctaccgtttgcccttcatgtaattctgatgagtcgctatgaataactttaccgataacttcatgacctaacaccatcggtgcctttatcatgaaattacctacttttccttcctgataataatgtaaatcggaaccgcaaattccacctcgggttatttgtactaatgttccattattattccaatctatcgtctgctcggtaacggcaacagttttcttgtccgcaacaacgcaggactgtgttttcacttgcataaattcctcactggtcaggtagacacctcggaagcatttaagcggttttaattgtcattatttgtgatgaagatcacgtcagaaaattgttacattactatgttacgcataacgtgatgtgccttgtaattcttatcagcagaaataaaaaaacgtgaaattattatgccaccaggcgtagtatcgcagcaggtaagatgattcaggagattttaaatggcgggtgaaagctttattttgatgggcgtttcagggagtggtaaaacattaattggtagcaaggttgccgcgttattatctgctaaatttattgatggtgacgatcttcatccagccaaaaatatagataaaatgtcgcagggtattccattatctgatgaagatcgacttccctggctggaacgcttaaatgatgcttcatacagtctttataaaaagaatgaaacaggatttattgtctgttcatcattaaaaaaacagtatcgtgatattttacgcaagggtagcccccatgttcatttcctctggttagatggcgactatgaaactattctcgcgcgaatgcagcggcgggctgggcattttatgccggtagcgttactaaaaagtcagtttgaggcgctggagcgtccacaagcagatgaacaggatattgtacgcattgatatcaaccatgatattgccaatgtcaccgaacaatgtcggcaggccgtgctggcgatacgacaagacagaatatgtgcgaaagggggtagcgcctcagatcagcgctgcgaatgattttcaaaaatcggctttcagaaccacgcggtaacgcgccttaccgttgcgcacatgctggatggcgtcgtttattttcgacatcgggaacagttcggtggtcggcgcaaccttgctgcgggccgcaaagcgcatcagcttacgaagctcataaggtgtgccggttgctgaaccagagacgctgcggtcgcccgcaattaacgtaaaggccggaacagacagcggcgtgaggaccgcaccgacggtgtggaaattaccgccatacgtcagcgcctcaaaataaggctgccagtcgaggctgacgttgacggtgttgataatgagatcgaactgccccgcaagtgttttcagtgcctgcggatcgcggctattcaccactttatcggcacccatcgccagtacttcctgctctttcgcaggattcgaactaaaggctgtcacctcgcatcccattgcgtgcagaagttttatagcgatatgccccagcccgccaataccaattaccccaacgcggctggtagcagtgatatggtgcatcaacagtggtttaaagaccgtgataccaccacacagcagcggcccggcggactcgatatcgatattttccggcagtgggatcacccattgccagtctgcacgcaacttctcggcaaaaccgccgcgattcataattgttggcaccgcaccttgctcgcagttgatctgattaccgctaatacaggcgtcgcaatgcccgcagctacgcgccgtccagccaatcccgacacgctgaccgacctgcaaacctttatcctgcgcggcgctcccgagcgccaccacgcgcccaatcacctcatgcccggcaaccagcggatactgtgaaaatccccattcgttgtcgatcatcgacagatcggaatggcagatcccgcagtaatccacctgcacttcaacatcttgtggcttcaattcaccgggctcgtactcataaacttccagttcgccgcccgcttcttttgcggcatagctttttatcatcgacattttttggtccttctctggtgttgtctgggaagtgtagagcatggcagggcggggtgcctggagtgtgacaaaggttacacatcgctgtatgcaatgctgaaaatttcagcacttagcgaggtgcgagcaagctggcgcttgcatggtggcgtgcgacaggtataatccacaacgttttccgcatacctcttcagtgccgaagtggcgaaatcggtagacgcagttgattcaaaatcaaccgtagaaatacgtgccggttcgagtccggccttcggcaccaaaagtatgtcaatagacctcaactgaggtcttttttatgcctgaaattcagtatttatctacctttcccgctatattaactctctcaaggtcaaccgatatcaacgtacttctaccaacatatgttggtacagatgatggtatttccggttcgataatgcttgtaccaacagggagggaatacgcatggcattaacagacatcaaagtcagaacagctaagccaacagataagcaatataagttgactgatggtggcggtatgcatctgcttgtccatccaaatggttctaagtactggcgtttgcagtaccgttatgagggaaagcaaaagatgctggcacttggggtttatcctgaaatcacactcgcggatgccagaatacgtcgtgacgagccacgtaagctgcttgcgaatggcgtcgatccgggagacaaaaagaaaagtgataaggttgaacagagtaaagcacgaacctttaaagaagtcgcgattgagtggcatggcaccaataaaaagtggtctgaagatcatgcccatcgtgtgctaaaaagtctggaagataatctttttgcagcgcttggtgaacgtaatatcgctgagttaaaaactcgagatttattagcacctattaaggccgtagaaatgtctggacgtcttgaagtggctgctcgtcttcaacagcgcactatgaggtgtactggcaatagcggacactaccatttgttctttttttaagcagccatctgatgatatttttccctgaaggctgccggggagatattccccagacgagagtgacgacgctgacgattgtagaaaatctcaatgtattcccgtattactgagatggcttcatcccggttattaaaacgatagtggctcaggctctcatttttcagcgttccccagaagctttccatcggagcgttgtcgtaacagttacctttacgcgacattgatgttttcagaccagactgctcctgtatgacccggtaatcgtatgcgcagtactgtgaacctcgatcagagtggtggattagcccggcaggtgggcgctggctcctgagcgccataaacagggctttacctgtcagctcttttgtcatgcgctctcccatggcgtagccgacaatttcgcacgtataaacatctttgatgccagcgaggtacaaccatccctcctgtgtggcaacatacgtcaggtccgccacccagacctgatttggtgctgtaggagcgaacgtctggttcagcagatttggcgcaactggcagattgtggttcgagttcgtagtcgctctgaacttgcgtttctgcttacagcgtagccttagctccttacgaagacgtgccagtcggtcacgaccaacgatgatgccattctctgccagctccgtctggagccgccgggttccatatgtttcgcgagtgcggatatgtgccaccttaatctccagttttagccgctcatcactttgttttctgtctgagggttcatgctgtacccagttgtaataaccgctcctggatacaccaaatacctgacacatcgcttcaatgggaaattgttgtcgccattgttcgattaacgcgtatttttcagcgactcctgtgcaaaatacgctgttgctttttttaatatatctcgctcaaggcgagcttcatttaacgccttacgcagttgcagaatttcagattccagttcagccaccgtgcgggaaccaggagtaccgagcccttttctggcggcggtaacccattgtcctaaagtgccttcaggaagagataatcgggaagcgccttcactgatcgaaagttgattttcaggaaccgttctgacagcttcggctttgaactctttagagtaacgttgggtttttctgctcattattagctccttctgatgccattctatttcaggaaggagtgtccgttaaactcaggctacctcagtatcctgcttttgctgccagcgccaccacgttgttgccggagtcagggttctgctcatagtcataaatcagtgtccggctcagggaaggtacggtactggctgctgccgatgtatagccgtcaataaataaaccgggagctgaagtggcacactgaatttggccacctgaacagaggtgatatgctcacctcagaacaacacaggtgctccaatgaaaaaaagaaattttagcgcagagtttaaacgcgaatccgctcaactggttgttgaccagaaatacacggtggcagatgccgccaaagctatggatgttggcctttccacaatgacaagatgggtcaaacaactgcgtgatgagcgtcagggcaaaacaccaaaagcctctccgataacaccagaacaaatcgaaatacgtaagctgaggaaaaagctacaacgcattgaaatggagaatgaaatattaaaaaaggctaccgcgctcttgatgtcagactccctgaacagttctcgataatcgggaaactcagagcgcattatcctgtggtcacactctgccatgtgttcggggttcatcgcagcagctacagatactggaaaaaccgtcctgaaaaaccagacggcagacgggctgtattacgcagtcaggtacttgagctacatggcatcagccacggttcggccggagcaagaagcatcgccacaatggcaacccggagaggctaccagatgggacgctggcttgctggcaggctcatgaaagagctggggctggtcagctgtcagcagccgactcaccggtataaacgtggtggtcatgaacatgttgctatccctaactaccttgaaaggcagttcgccgtgaccgagccaaatcaggtgtggtgcggtgatgtgacctatatctggacgggtaagcgctgggcgtacctcgccgttgttctcgacctgttcgcaagaaaaccagtgggctgggccatgtcgttctcgccggacagcaggctcaccatgaaagcgctggaaatggcatgggaaacccgtggtaagcccggcggggtgatgttccacagcgatcagggcagtcattatacgagcaggcagttccggcagttattgtggcgataccagatcagacagagtatgagccggcgcggaaactgctgggataacagcccaatggaacgcttcttcaggagtctgaagaacgaatggatgccggtggtgggttacgtaagcttcagcgaggcagctcacgccataacggactatatcgttggatattacagcgcactaagaccgcacgaatataacggtgggttacccccaaacgaatcggaaaatcgatactggaaaaactctaactcggtggccagtttttgttgaccacttcacacactttttagaaaaatcgatggtcagaaactggattagcaattccgttccagggttgcttttgatttacgttggcgtctgatcattgatttatcctcaaaagcccaacctcattggtaatgaaccagctccgtgaatgtccgctctggcacagagcgaaattttttgatctcccccccctgaaatctaaacttagtcatgtcacgtttttgggtttctaaaattttaacttcgcgtttttcgttgccgtaagggttatacagaaatgtccgttaagcagagttcaaaattgattgccgtgatcacgactggtttgaaagccgcgcccaagcctgtacagctctggtttgcgttgattatgaacctgtcagcctaaagcaagcggatggacgatgagtattggtaatctttcagagtccggaaaagttcagccccagtctgaacaggcttgctggcgccagtccagtttcattcagtcgtggtttggttcttacggcctgtgcaatctacctcattaggcacatcggcctgccagataccggctcggggtgtatttccgcttccacgctgaatactgttctcagcaatcctggggtcatcacctcttctggtgtgccttgcgccataacatgtccgtttgccattaccaccagttgatcgcagtaccggctagcctgattaaggtcgtgcagcacagcgaccaccgttttcccctgagtccggagttcgcccatcaaccgcatcaggtccacctggtgattgatatcaagataggtggttggctcatcaagtaatacaacgggcgtattctgggccaggaccattgccagaaatgcgcgctggcgctgaccgccggaaagctcggttaaccgacgaacggcaagatgattgatccgggtctggttcatggcgacattaactcgtgcattgtcttcagcggagagacgcccccagagtgacagccagggattacgaccatacgaaaccagctcctggactgtgatcccctctggcgttaaatggtgctgaggcagcagcgaaagcctgcgggccaactggcgcgatgagagcatatttatgggattatcgccgagaaatacggtgccagactgcggcattaaaagccgcgaaaaacagtttaacagcgtcgatttcccgcaaccgttaggaccgatcagggcggtgatcttccccgttggcagtgagagtgaaacgtcgttaagtaccttgtctgtcccgtaattgaccgtcagattttcagttcgtaaagtcatttatcgcattctcacaagcaaccagacaaaccacggcgcaccgataatggcggtcagcacgccaaccgggagctccagtgggggatgaataattctcgccagcagatcggcaaccaccaacagcaacgcacctgtcagggccgaaacaggcagcagtctgcggtgacgtccaccggtgatgctacgcatcatatgcggcaccacgagaccaataaagctaatcgggccgcaggcggccacgccggtagatgtcatggcgacagctagtaacaaagcccagaatcgggtatagggcaccgacacaccgagcgtggtggcgcgcgcatcgccgagtgcaaggaggtcgagatcgcggcaaaaactcaggctcagcggcagaaataaaatcatcagcgggatggcaatcttcacaaagctccagtcacggccccataagctgccggtcagccacagcagggcgttgttcacatcctgcgggcgcgagagcatcagataatccgtcaggctggcccagcatgcagaaagcgccacgccggtgagtgccagcttcatcggctggtgggtctttgccagcatcttcagcaatatcaaccccgccatgccgcccgcaaaggccagcagcggcagcaccatcacgggcagtgacggcataagaagtagagcccccacagaggccaggctggcggcatggttaacgccgagaatatccggtgatgccagagggttgcgcacaatcccctgtatcagcacgcccgccacggcgagggctgcaccgacaaacagtgccagcagcaagcgcggcagtcggtactccatcaatacataataatgctcgcgtccggcctgccagtcggtcagcagcgcgcgccacggcacggggatcactcccatatggagtgataacagcgcacagcccgccagggcaagggtgatgaaaataaccagcgcaattttcatcctcgcctcctcacaagccagacaaagcaagggctgccaatcagcgccagcactgcgcctgcgggcagatctccggggaaggccagcgcgcgtgcgagtacatctgccagcagcatcagcgtggcccccagcagcatgctcactggcagtacgttgcgctgatcgaagcctgcccagaagcgcgccagatgtggcaccagcagaccgataaacgccaccggacctgccacgctgacgcacgcaccaaccagaagcagcactaacatattgatgaccaaacgtagcctcgtcaggttcactcccagcgtatgggcggtgctgtcgctgaggttgagcaggttcagttgattcgccagcagcaacacgacagggactgcagtgaccaccaccggcaagagctgccagacatcctgccagcgggcgtgggacactccgccagccagccagtaaaagatgccgtaagcatgatcttcggccagcagcagggtgatgcgggtaaggcccatacaaaaggccgacagcgcgatacccgcgaggatcagtttgtttctgtcatgggtatgacgaaatccgcctcctgcggtcatgaccagcagccagctcacgccgcccccgcatgccgcgatgaacgacagagaatagcctgcaatcggcgtcggactcagcgcgctggtaagcgccatagccagcgccgcgccgctgttaatgccgagcagtgaaggagaggccattgggttgtgggtcagggtttgcagcagcgtgcccgcgagcgccaggcttgcgccgatcagaacggcgaccaggcttcgtggcaaacgaaggttttgcaccagcgcttctggtagcgttggcgtgtgtccaggcagcagggcgcgggttgcatctgctccggaaacaggaatggccgagtagcaaaacagactcagccagaaaataataataagtgctgcaacgggaagcccccacagcagcaccgggtgttttatcgcggtcatttcacaacggtaagcggctgatggtggaagatttttaccgtgtcagcggcaatacgctctgcagcaaaaataccgcgcatccgcgcccaggtgttactgtcgaccgaagcaacctgctgcttctgcgcggcggttaacatctgccagagcggatcttgttgccagcgtttaacaatgctctcttcgcgatagtgggcaaccagcagccaggcaggattgaccgccagcagttgctccaggccgatggacggcatggacgcacccgccatcgcagcgggaacgttcagccccagagaggccagcacgctgccggtccaggtctcctgagtatgcaggttgaattgctgttcgcgtgatgtgccaaaggccacgcgtgtccctttgggaagctggctggcccactgcgccatcctctctttatgttgttccagacgtgcctgcatctctcgctttttacccaccatttcgccgatgatagccgcagattgcaaattttcagcgtaggtttcgttgcgggacttaagcagcagtaccgacgcgatttgctgcaaggcgatgtaaacccccgcatggcgactgctgtcggcaatgatcaggtctggtttcagagcggcaatggcttccaggctcggctgcgcgcgcgttccgacggactgccacggtttcaggtgcgcacgcacttcgggcaggatgcgttttgcatcgttatcgtcggcaataccgatcgggctgacgtccacggcggccagcgcatcggcgaacgagagttccagcaccacaatccgttgtggcgttttttcgagtgtaaacgtgccgtgttcgtcctgaaccgtggcggcaaaggcgtggctgatcaccagcagcaggcctgcaaaaagaaaacggataaatgccaacataatcacattccagctaaaagcccggcaagccgggcgttaacacatcagaacttcaacgccccctgcatatacagcgtgcgcggctggcctgcatagatgcctttgttgttgtcgtcataagagcggatgaagtagtcctggtcgaagatgtttttcacaccgaatgccaggttcagatctgccatctgcgggccaaagtcatacaccacgcgtgcgccccagagcatgaagccgggaatgcggccggtactgccgtcggcgctctctttcaccgtattggcgttatccgcaaactggctggactggaaatcgctgttcagattgaacatccagtttcctggcttgtagtccacgcccagcgtgcctttatgtttcggggagaatggtaccagattgccgtaggtgtcgcctttctcgcggatttccgcgttcacatacgcatagctggcgtagatggaaacgttatcaagcgttggcgttagcgtacccagatcgtaacgtgcctgcgtttccagcccggtatggcgcgttttgccacgtgcagtgacggtgtcgttggtctggttggagtcgtactgattgttaaagttaatcaggaacagccccatttccgccgtcagcgcgccgtcgtcgtagcgggtaccgagttcccaggttcgcgctttttccggttccacattgccgctttgcacagccttgccaatctggctgtactgtacggtgccgaacgagccttcagtgtttgcataaagattccagctgtcagtcaggtgatagagcacgttcaacgccggaagcggtgcgttatagctcacttcttcgtgcgtgcctgtgatggcgttgttctggtatgactcgatatgttcgaaacgcatacccggcgtgatggtccagttgccgatgtcgattttgtcatccagataccaggcgtgcgcctcggtgccggaacgcgtatcgcggtcgtaagggcttgagccggacggcaactgcccgctgctggtggcggtgtagtaacgcatttcatgcgttgattcattcacatagcgatagcccacgcccacttcgtgcgcggaagggccgatcataaagatctggctgtagcgtggctcaataccgcgcacccagtagttacgcggcgagagggtgatgcgtttgccttgctccaggtagccgctgcgcagggtttgggtgtagaacccctgaatgttgaatttatgctggctgtctggctggaactggtagcccaggctcgccagcttgcgacgaccccagaagcggtcatacgggcgggtggattgccagcgatcggcgtcgtaatccgcgcgagacaggccaccgggcatgtcggcttcaccgtcgtaatattgcagcaggctgttgaaggtgtgcacctcatccggcgcatatttgcttttcagcatcaggtcgtcgatgcgggtggcgctgtgctcgcgccagtcactgccgcgcgtgccggagtagagcagcgcggtgccaaaaccgttgtccgctgtgccgcccaccatcaggttgtgcgtctctttcgggttgttttgtgaagaggttgggctgagctgaccttccacgcccgcctcgataccaaagtcctgcggaatggcacgggtaacaaagttcaccacgccgcccacgctctgcggtccgtaacgcaccgcaccaccaccgcgtaccacgtcaatggcatccatgttgccgagcgaaacgggagccagtgaaagctgcggctgaccgtaaggggcgaaggggacggggatgccgtccatcaggacggtcgagcggctggcgaggcgcgggttcaggccccggatgccaaagttcatcgccaggtcgtggctgccggtgccgttgttttccggcgcgctgacgccagggatgcggttaagtacctcacgcatggtggttgcgccggttttggcgaaatcctcacggcggatcacgtcacgcgcgccagcatgttcaaatacgtcgttttcacgcgcatcacccagccagtcgccgaccacggtcagggcatcttcttttggtgcgggcgcgggctccagcgtccagctgttatttcccagcggttttacctgcagtccgctgccgtccagcagttgttgcaggccgctctcgacgtcgtaatcgccgtgcaggccgttgctctgcttgccgcgcgtcaggctggcgtcaaccgagagggtaaatccgctgtgtgcggcatactgattgagcgctttatcgagcgatcccggtgcgatattaacctgtgcagcaaaagcggaaaacgagagaccggccagcggcagcaggctcaggcgaatggcgttaaccaaaggtgttgttttacgaaaaacgcgtaacggcgtcataccttccccatcatcatttttgttgtgttcagctatgagtcgaacgagaagggtaaaaaggacaatcgaaataagaattattttccttacagtggtgaaatgtttatccagtaccgcgtaatagactgaattttaacgggaagcgtttgcgcgataacgttcaggatcgcatcggtatttttcagcgggaacgtcccgctcaggcgcagcccggcaacggcgggatcgcagcgcagcacgccgttgcggtaacgggttagcgtggctatcacctcacccagcggtttatcgctgaagctcaggatgtccttcgtccagcttgtactctcgtcatccagcggtttcactgcgccaaactcagaggcgctgaactgcaggctttcaccagcgttcacgatgcgtttttgcgcgggggcactggcgagaagcacttccacggcgtgctgctgcacgtcaagctgcgtgaaattatcctgctggcggacggtaaattctgtccctaaagcagtgagctggccctgacgggtcaggacacggaaggggcgttgcagggcatctttcgcggtagtaatggcgatttcaccgtaccagagccggacggtgcgctgatgcgcatcaaaacgcatatccgccgcgctttgggtattcagcgtgagcagggagccatcttccagttgctgacggctgactgtgcctttggcggtgcggtaatctgcccgcagaccttcgccggtttccgactgccagagctgccagcctccgccagcgccgagcaacagcagtaatcctttcatcacgtgacggcgggtgaggcgggtatcgtgcaacgcccggctggcaacgtcgccaggcacaccgccaagctggttgcgcaggttttcaacctgctgccaggcccactggttatcctgatcctgttcataccactgttgccagcgcgcttcctgttgtgggctgacgcgctcgccgcttagcacggcataccagtgggaagctgaacgcagcgcctgacggcgggaatcggttaacaaaggattcataacccatactccagacggaacagcaggcagtgctcgacggctttcgccacgtattttttcacggagctgatggaaacaccgagtttgtgcgcaatctcgctgtatgtcagaccatccagttgcgaaagcagaaacgcttcacgtgttttgccgtttagcccgtccagcatgctgtcgaggagttgtagggtctcgagttggctttcgcgttcctcaggtgaaggcgctcccccctccggcataagcgccagcatctccagatacgctttttccagcgcgtttcggcgaaacaggtccaccatcacgcgtttggcgatagtgcagaggaaggagcgaggatcgcggatcgtcgagagcgtttcgctgaccattacccgcaaaaaagtgtcctgggcaatgtcatctgcatcaaaagcagactggagtttgcgcgtcagccagcttttcaaccagccgtgatgtgtgccataaagcgactcgaatgttaaggaagctgtggtagtggcgcggtcagacatgcggagtgcatcaaaagttaattatcacgtagccatattaatatgagaatagttatcattacaattggaaataaaattgtttccaatagacatttttaacatgttgtttttctaagtgttataaggtaggtataaaatgggatggagcctctgcttctggcatgtgtcggtcagaatgactcatgatgtggtctgctattattgacatcctcactgccctaaaggatagggatttcggtaatgctgtcaacttactgatttagtgtatgatggtgattttaaggtgcttgcgtggcttccatttccatcagatgtccttcctgctccgctactgaaggcgtggtgcgtaacggcaaaagcactgccggacatcagcgctatctctgctctcattgccgtaaaacatggcaactacagttcacttacaccgcctctcagcccggtaagcaccagaaaatcattgatatggccatgaatggcgtcggatgtcgcgccagtgcacgcattatgggcgttggcctcaacacggttttacgtcacttaaaaaactcaggccgcagtcggtaacctcgcgcatacaaccgggcagtgatgtgattgtctgcgctgaaatggacgaacagtggggctacgtcggtgctaaatcacgtcagcgctggctgttttacgcgtatgacaggatacggaggacggttgtggcgcacgtcttcggtgaacgcactctggccacactggagcgtcttctgagcctgctgtcggcctttgaggtcgtggtatagatgacggatggctggccgctgtatgaatcacgcctgaagggaaagctgcacgttatcagcaagcgttacactcagcgcattgagcgacataatctgaatctgagacaacatctggcaaggctgggacggaagtcactgtcgttctcaaaatcggtggagctgcatgacaaggtcatcgggcattatctgaacataaaacactatcagtaagttggagtcattacctcctcccgaactcaaaactatcaggtgatgctgccaacttactgatttagtgtatgatggtgtttttgaggtgctccagtggcttctgtttctatcagctgtccctcctgttcagctactgacggggtggtgcgtaacggcaaaagcactgccggacatcagcgctatctctgctctcactgccgtaaaacatggcaactgcagttcacttacaccgcttctcaacccggtacgcaccagaaaatcattgatatggccatgaatggcgttggatgccgggcaactgcacgcattatgggcgttggcctcaacacgattttacgtcacttaaaaaactcaggccgcagtcggtaacctcgcgcatacagccgggcagtgacgtcatcgtctgcgcggaaatggacgaacagtggggctatgtcggggctaaatcgcgccagcgctggctgttttacgcgtatgacagtctccggaagacggttgttgcgcacgtattcggtgaacgcactatggcgacgctggggcgtcttatgagcctgctgtcaccctttgacgtggtgatatggatgacggatggctggccgctgtatgaatcccgcctgaagggaaagctgcacgtaatcagcaagcgatatacgcagcgaattgagcggcataacctgaatctgaggcagcacctggcacggctgggacggaagtcgctgtcgttctcaaaatcggtggagctgcatgacaaagtcatcgggcattatctgaacataaaacactatcaataagttggagtcattaccaaactatcatacagataattactggttaaccctatatagggcattttaaagtgttgtgatcttacccagcaatagtggacacgcggctaagtgagtaaactctcagtcagaggtgactcacaagacaaaacagtttcaaccagtaaaaaaacgtaaacaccattcgcatgaatttcgtagttaagatctgaagcttgcagaatgcatcggtgttactgccggagtccgtgaacttagtctgcatgaatcaccacagctttacatctgtcgcagtaaacagcaaaatcagcaaacttacttaattatatcgagtgcgattacaatcgctggcgatggtacagttggtgtggcggtctcagtccggaacaatttgaaaatcagaatctcacttaaagcggcatccattttacaaaagatggccgtctgtgtatttgtaatgaataccttctacatgtttagagtgcataatccacgacaaggcgatatcctaaaaattagctagcaggcaactttgatggcatagataatgtttttagtaaaaaagagttgactgaatataatacagcctcttcctacataagaaggaatgtgctcacaaaaaaaaaccattagtctgcttcctgttcttacaataatcagtattatgtattttatttatatagcaaaatatgcttgttacacctgtcataattaggcatggtaaaattattgactgaaccctgggggaggaagatgcacagtgattattataatatggtttttggtgaaaaattggccaatattttatatgaggctaactctcaatttttttacgagagaaatgtcatagaagaggcagtcaacgctttattctgtgagcgtgaaataataaacaacaagaacataataaagaagctgatgttctttttgtcagatgttaatcacaccaagaaagatgttgttcagagcgcacttaatattatcattgacattacatcaggtgatatttgagattttacataaaagataatctctcaaggagtcttatctgaaaacgaaatatatagtccctctcgggtgatgctgccaacttactgatttagtgtatgatggtgtttttgaggtgctccagtggcttctgtttctatcagctgtccctcctgttcagctactgacggggtggtgcgtaacggcaaaagcactgccggacatcagcgctatctctgctctcactgccgtaaaacatggcaactgcagttcacttacaccgcttctcaacccggtacgcaccagaaaatcattgatatggccatgaatggcgttggatgccgggcaactgcacgcattatgggcgttggcctcaacacgattttacgtcacttaaaaaactcaggccgcagtcggtaacctcgcgcatacagccgggcagtgacgtcatcgtctgcgcggaaatggacgaacagtggggctatgtcggggctaaatcgcgccagcgctggctgttttacgcgtatgacagtctccggaagacggttgttgcgcacgtattcggtgaacgcactatggcgacgctggggcgtcttatgagcctgctgtcaccctttgacgtggtgatatggatgacggatggctggccgctgtatgaatcccgcctgaagggaaagctgcacgtaatcagcaagcgatatacgcagcgaattgagcggcataacctgaatctgaggcagcacctggcacggctgggacggaagtcgctgtcgttctcaaaatcggtggagctgcatgacaaagtcatcgggcattatctgaacataaaacactatcaataagttagagtcattaccttccgagccataatcgaaaaggcgcggatgtctattaaggcatccggctaatctgtaagcaataacaacggtttatgcggtgcgcgtttttcacccttgtgccagattattatattggcaattgcctgctgttcgagcccgcaagtgaagagatattaccttgatcttatttgttttttgttgtctactctgagaacgaacaaggacatcccccatgaataaactccccgctcacctttcgcgccaaaactgcaaaattgcttctacaaatctgtcagaaataatcccccgacgggctgccgtgctgaaatgactgcttcgcagtgccgtcgtccagttctccggtgaccggtacgctgaaccgtaatatcccgtgcttaaatcgtccgggtcttcatcaggcgcgttcgtcagtcctctttcaccttgttgctggaagtcgacgaaaataatattggctaaaacattattttgataattgccataaatagcttcatacgaatgcgggaaattttctttccagtaccaggtggtatcgccgcaaaaccatggcgcgtcagtaatattattaagctgagaatggtattgttttagatccctacgaaaggcttcaaccatatgattaaagtgttgagggtgtgacgcgtagtcactggtcattaagtcaaattcgccttgcatccagcatacgccgaggaatttgttctgcggattttttgccagtgcggctcgcgttctgctgactaaatcctggtacagcggagtatccgttccccaacgacaagcatcatggctggctccgtgccgttctgaatatgtcccttcgctgcccgcggtaaaagccgatccgccacggcaacacggaacgataagaatccctgcattattaggaatgaagggcagtaatttccgtgcaatatgcagtgcctggccaacggtgccgtactgtgtttgatgattcgttgccagaggatggtgataaccctgcatatcctgaacatcgtgtgggcagtgagtcagtggaataatgtcgttaaagtgacatggcgggcctccgggatgcgtatgcgcaaatctcgctaattgtttaattctggaatgaggcgcatcttccctgtccggtaatggcagtccttcgccatacgccatggcattagactgaccagcaacggtaagaacatagtaataatcgggcgatattattgcgttcatataattttcgcgtaatacaaatgacaaattgatagcagggcccctttaccggggccctgaagcgttagttttgtactgtgactttattatccttcacagaaattaaaactgaatccgtcaccgctttgccgcctgcagtttcaccgccaataattaataaactattattccagggcaatgatactccgtaggcccgaccttgcgataattcacccgatttatcccatttcccgttatgccaaagatgaatatcagtgctatatgattttttcaggccttcatgcgcatagttcttaccgttctggtaattttctcgtgaacctttgaatccggcccctccggcaaatataagagaatcattgcttatccccgcaaaaccgccagcgacgccatctggtgatgagacgggatcaagcttattccattttaaattattaccggtgaaatcaagttcaaatacggcatccgttcgcaatcctggtttggcttcgccattaataagccaggttttatcacctttattcacaaccgccgcaccagccgttccgtaccagggcgattcgccagcgtaactccattgctgtgttgagggatcaaaagacaacagaaacttattgaagaaataatcttctgcttttttgtcaaaatagtgggcgttgattttatctatagcggttgaatcttttccagcctcgttgagatcttcaaaatagccattgaagatattctggttaacaccgccagtaacataagccttgccgttgtgtacaaaagtcacatgacccgccatgcccatcggcgcgagcgacatcaatttaacccagctattggttttggggttgtatttgtgtacgtcattaaatacctgagtcaatccctcgctgtttttgccaatgccgccaaacacatatagattgccatcaataaatgcagaggttgcttgatctctcggtccaccagggaatgcagctaacgcagtccattttttatctttggcctgtgtatctagcttgtaccatgctgtacctgcgctacctaaaccaatgtagacagtgtcgttatcaattgctccggtaccacttttaaatggcacaggagtttccggtaatacagacgcgtttgcggcaaatgaagccatcatgatagcaagcgccattatagttttattcattgtgactgtctcctgtctactacagtttaaatgacacaccaatgcgataactgttttccgataaattatctctgccgttgtaaacaccctggcggtcaaggtagtcatattctatgtatggcgtaatatcgggcgtcatatggtattgtagaacaaaggcattttccgtcgcccatttcttgtggtttgcatagcgataatcattctgtttgctgtatagcgtcgtttgccatgcgaaggtgaaatcactattaatatggtaagtgacatatccatcccaacgatgaacgttatcacgagacatatcaccggataagtcttgttgtcggtaagctttccagtcgtaacgatagcgaatgccaaaattaagatcttttgtcgcgtcccaggacagttttacgtagggtccgtagcgtgtgccgttgctgctaaaatgcgttaacattcccgggcgcaccgtccattgatcatcaagtttaatcgcgtaattaacttcaacctgaacatcattgagtgcggcattttcctttttattatcatgaatggtattccaggtattactttccatgcttgcccaccatccattttgccatccctcactgactttgagtcgagtctcataggcatggcttccgctacgatatccaccacgtacgtccagtgtcgcagcctgagaaattaatggtgacgaaaagcacagtaataatacgccagaaagtattttagcctttttcataaatttcactcatttgtaggatacagaaagcaatacaaagcccgcataaacaattagcatttatgttgtgtaatattttttgccaggcttatagtgtctttggcaacgggtagcttattttatatttttgtataaggtctcctgtgaaaattctctttccacattatttaaataaacagagaatcagattaaatacctgagtataaaatctcttctgatgtttaattgatttgaatgttcgtaagctatatcacttactcaatccattttacccagagtcataaaatagagtgtctgttgatctcattttcatattcctttcagactgaagtgcgttttcatcacccgatgagaaagaactgaagtgatgtttgccatagattgcgagatgccctgtctcattgactatcgcggtgcacctttatacctgttataccagatcaaaaatcacgcaagccatacaacaaaacgagatttgcaattcgtgtcacaaaatatgtcgatctttttctaagaggaagatgccatgtgaagccagacgaacacttgaggtggtcttcaaaaactaaaggatttcttttaactgtttgttttataaaaaatttatttagggtctaaacaagggaagctttgcaagctaactcagtgagcgtggtgaaaacaagtgtttacccgccatcaggctgatcataattctcaccatgaaatatgtttcctgatttgtggcttgtaactggtcgcttctgaagtcgatctagagaggcttgttgatgttggtgttttcaggatgatgtttcacttagtttgtttgccgtatcgcccggcgaatagctgtgattgaggaaggtttaagtcgcagtgaccaaagccatatttacccacgaatgtagatgaaaaagcgtctcctgcgttcccccttatctccaggggtgatgctgccaacttactgatttagtgtatgatggtgtttttgaggtgctccagtggcttctgtttctatcagctgtccctcctgttcagctactgacggggtggtgcgtaacggcaaaagcactgccggacatcagcgctatctctgctctcactgccgtaaaacatggcaactgcagttcacttacaccgcttctcaacccggtacgcaccagaaaatcattgatatggccatgaatggcgttggatgccgggcaactgcacgcattatgggcgttggcctcaacacgattttacgtcacttaaaaaactcaggccgcagtcggtaacctcgcgcatacagccgggcagtgacgtcatcgtctgcgcggaaatggacgaacagtggggctatgtcggggctaaatcgcgccagcgctcgctgttttacgcgtatgacagtctccggaagacggttgttgcgcacgtattcggtgaacgcactatggcgacgctggggcgtcttatgagcctgctgtcaccctttgacgtggtgatatggatgacggatggctggccgctgtatgaatcccgcctgaagggaaagctgcacgtaatcagcaagcgatatacgcagcgaattgagcggcataacctgaatttgaggcagcacctggcacggctgggacggaagtcgctgtcgttctcaaaatcggtggagctgcatgacaaagtcatcgggcattatctgaacataaaacactatcaataagttggagtcattaccatctccaggataaaaaggaatgtaacaatctcatggcgtaagctgacgaaccaggcaggaataatcgctagggacctaagcattagcatgataatagccactaagaaattactgtgttccatgaaatagccattttgtggcaaatggagttgactaataatgtcatatgtgagacggctagttgaacgaatattaaattttgctgaattttttatgttgattttacttgttacagaacatatcacatgatatatagataagattagttgcattaatgatgagggttattattagattcgtatcaggttgataaatatataaaggtacatagcatgcaagagcatggcgtttgtatggcaaagttattataagtaactatcgctactccatttaagttcgctcagaagaactggtccacttacgttagttattaagcaaacgttcgcttttataaacataatcaggattaaaatgttggattattgctaacccagcacagctagtgcgcgtctgtaattataagggaaaacgatgaagaataaggctgataacaaaaaaaggaacttccttacccatagtgaaatcgagtcactccttaaagcagcaaataccgggcctcatgcagcacgtaattattgtctgactttgctttgttttattcatggtttccgggcgagtgaaatttgtcgattgaggatttcggatattgatcttaaggcaaagtgtatatatatccatcgattaaaaaaaggcttttcaacaacgcacccgctattgaacaaagaagttcaggctttaaaaaactggttgagtatccgtacttcttatccgcatgctgagagcgagtgggtatttttatcacgtaaggggaatccgctttctcggcaacagttttaccatattatctcgacttccggtggtaatgccgggttgtcactggagattcatccgcacatgttacgccattcgtgtggttttgctttggcgaatatgggaatagatacgcgacttatccaggattatcttgggcatcgcaatattcgtcatactgtctggtataccaccagcaatgcagggcgtttttacggcatctgggggtaatgactccaacttattgatagtgttttatgttcagataatgcccgatgactttgtcatgcagctccaccgattttgagaacgacagcgacttccgtcccagccgtgccaggtgctgcctcagattcaggttatgccgctcaattcgctgcgtatatcgcttgctgattacgtgcagctttcccttcaggcgggattcatacagcggccagccatccgtcatccatatcaccacgtcaaagggtgacagcaggctcataagacgccccagcgtcgccatagtgcgttcaccgaatacgtgcgcaacaaccgtcttccggagactgtcatacgcgtaaaacagccagcgctggcgcgatttagccccgacatagccccactgttcgtccatttccgcgcagacgatgacgtcactgcccggctgtatgcgcgaggttaccgactgcggcctgagttttttaagtgacgtaaaatcgtgttgaggccaacgcccataatgcgtgcagttgcccggcatccaacgccattcatggccatatcaatgattttctggtgcgtaccgggttgagaagcggtgtaagtgaactgcagttgccatgttttacggcagtgagggcagagatagcgctgatgtccggcagtgcttttgccgttacgcaccaccccgtcagtagctgaacaggagggacagctgatagaaacagaagccactggagcacctcaaaaacaccatcatacactaaatcagtaagttggcagcatcaccagaattgactgccgggtgattttaaaccggaggaataatgtcatatctgaatttaagactttaccagcgaaacacacaatgcttgcatattcgtaagcatcgtttggctggtctttttgtccggctctttgtcgcctgtgcttttgccgcacaggcacctttgtcatctgccgaactctattttaatccgcgctttttagcggatgatccctaggctgtggccgatttatcgcgttttgaaaatgggcaagaattaccgccagggacgtatcgcgtcgatatctatttgaataatggttatatggcaacgcgtgatgtcacatttaacacgggcgacagtgaacaagggattgttccctgcctgacacgcgcgcagcttgccagtatggggctgaatacggcttctgtctccggtatgaatctgctggtggatgatgcctgcgtgccattaacctcaatgatccatgacgctactgcgcatttagatgttggtcagcagcgactcaacctgacgatccctcaggcatttatgagtaatcgcgcgcgtggatatattcctcctgagttgtgggatcccggtattaatgccggcttgctcaattataatttcagcggaaatagtgtacagaatcggattggtagtaacagccggtaatgactccaacttattgatagtgttttatgttcagataatgcccgatgactttgtcatgcagctccaccgattttgagaacgacagcgacttccgtcccagccgtgccaggtgctgcctcagattcaggttatgccgctcaattcgctgcgtatatcgcttgctgattacgtgcagctttcccttcaggcgggattcatacagcggccagccatccgtcatccatatcaccacgtcaaagggtgacagcaggctcataagacgccccagcgtcgccatagtgcgttcaccgaatacgtgcgcaacaaccgtcttccggagactgtcatacgcgtaaaacagcgagcgctggcgcgatttagccccgacatagccccactgttcgtccatttccgcgcagacgatgacgtcactgcccggctgtatgcgcgaggttaccgactgcggcctgagttttttaagtgacgtaaaatcgtgttgaggccaacgcccataatgcgtgcagttgcccggcatccaacgccattcatggccatatcaatgattttctggtgcgtaccgggttgagaagcggtgtaagtgaactgcagttgccatgttttacggcagtgagagcagagatagcgctgatgtccggcagtgcttttgccgttacgcaccaccccgtcagtagctgaacaggagggacagctgatagaaacagaagccactggagcacctcaaaaacaccatcatacactaaatcagtaagttggcagcatcaccgtaacagccattatgcatatttaaacctacagagtgggctaaatattggtgcgtggcgtttacgcgacaataccacctggagttataacagtagcgacagttcatcaggtagcaaaaataaatggcagcatatcaatacctggcttgagcgagacataattccgttacgttcccggctgacgctgggtgatggttatacccagggcgatattttcgatggtattaactttcgcggcgcacaattggcctcagatgacaatatgttacccgatagccaaagaggatttgccccggtgatccacggtattgctcgtggtactgcacaggtcactattaaacaaaatgggtatgacatttataatagtacggtgccgccggggccttttaccatcaacgatatctatgccgcaggtaatagtggtgacttgcaggtaacgattaaagaggctgacggcagcacgcagatctttaccgtaccctattcgtcagtcccgcttttgcaacgtgaagggcatactcgttattccattacggcaggagaataccgtagtggaaatgcgcagcaggaaaaaacccgctttttccagagtacattactccacggccttccggctggctggacaatatatggtggaacgcaactggcggatcgttatcgtgcgtttaatttcggtatcgggaaaaacatgggggcactgggcgctctgtctgtggatatgacgcaggctaattccacacttcccgatgacagtcagcatgacggacaatcggtgcgttttctctataacaaatcgctcaatgagtcaggcacgaatattcagttagtgggttaccgttattcgaccagtggatattttaatttcgctgatacaacatacagtcgaatgaatggctacaacatcgaaacacaggatggtgttattcaggttaagccgaaattcaccgactattacaatctcgcttataacaaacgcgggaaattacaactcaccgttactcagcaactcgggcgcacatcaacactgtatttgagtggtagccatcaaacttattggggaacgagtaatgtcgatgagcaattccaggctggtttaaatactgcattcgaagatatcaactggacgctcagctatagcctgacgaaaaacgcctggcaaaaaggacgggatcagatgttagcgctgatatgactttccgtgtcaaaccggaatctctaattttgacgattttctttttaggtttaattccctgagggcgacgtagcagtaaatccgacggtgaatcacgctgatattcgcgggttggataccgcattacagaggtccgtcatatgagcctgccactttcttacgtcgcgaatcagctttgttccgccgtcgccaagcgctaacgtgggttactcttgtaccgggctacgtcgccttcagggaactggttattctcattttttatttgtgacattgtggttgttgtgcgacagacattgctattcggcccatatcccagataaaacccgccagctcacgtgcaacagcaacaattgtaatattgacattctttcctttggcctgaagttttcgatacctcttacaaagcctgagttgagcatcccatgctctgtcaatgacggggcggggtaaattttcctgccttttttgtattgccggactgatgcgtgccggatgacggtaactccacgctgcctcgaccaatagctttctggcatagctgtttccggctttggtaatgctgccctgatgtctgcttccacccgatgaatattctgatggcgtgataccaaaccatgacatcagttgtcgtggatgttcaaaacgggtcagatcacccagttcagaaattaatccaaccgcagtaataaactgaatccctcgcatggcttgcagcgcctctactaccggatacagcctccattcggtaacggcctccttcagggcggattccagccgttcacattgtgcctgccgatcttctattgtacgacggtgttcgtcaaaagctaattgtcgccagggactttcgaatgagtatttgctgagccagcgtcggtgtgcagggccccaatctgctcgcccgacataatggaccccatgaaccagaagaaacgatttcagacgttgccttgcatgccgtaaatcatcgcgggcagatgcccatgcccgggccaaatcccggaatgcctcatcttcaatgccgggtacgtagacagcagaaagatctcctgcacgcagtgaacgcacaagtctgatggcatcacggcgatcggttttaactcgctcccccggttttttcgggataagtgagggggcgcagaccatgcagtcaaaaccggatttcaccagccgacgataaagtccataaccacagggccccgcttcataaacgatactgacctgcgatgactttgacctgagacgtttacaaagattctgaatatcagtaggtgatgtgccaattttacccatcagttcaacaggttctgaattgatagcataagcgacagtaatcgattctttgtgaacatctaacccgacgtacaatgtgttattgttgttcatgctggcctccgtggtggaaataccggggtgtagcaacagctcacccatgcggctctgacaacgatgttaacccgcgttaaatatcccacgttggccagcatctgtctcacagaaagtcatactgccttaacgtcaatattcctttcagccactggctgcgttctgacagtaaatctcagtggcgacatgccagtgccagttacagcatgtcacacgatctcaacggtcggatgaccaatctggccggtgtatacggtacgttgctggaagacaacaacctcagctatagcgtgcaaaccggttacgccgggggaggtgatggtaatagcggaagtacaggctacgccacgctgaattatcgcggtggttacggcaatgccaacatcggttacagccatagcgatgatattaagcagctctattacggagtcagcggtggggtactggctcatgccaatggcgtaacgctggggcagccgttaaacgatacggtggtgcttgttaaagcgcctggcgcaaaagatgcaaaagtcgaaaaccagacgggggtgcgtaccgactggcgcggttatgccgtgctgccttatgccactgaatatcgggaaaacagagtagcgctggataccaataccctggctgataacgtcgatttagataacgcggtcgctaacgttgttcccactcgtggggcgatcgtgcgagcagagtttaaagcgcgcgttgggataaaactgctcatgacgctaacccacaataataagccgctgccgtttggggcgatggtgacatcagagagtagccagagtagcggcattgttgcggataatggtcaggtttacctcagcggaatgcctttagcgggaaaagttcaggtgaaatggggagaagaggaaaatgctcactgtgtcgccaattatcaactgccaccagagagtcagcagcagttattaacccagctatcagctgaatgtcgttaagggggcgtgatgagaaacaaacctttttatcttctgtgcgcttttttgtggttggcggtgagtcgcgctttggctgcggatagcacgattactatccgcggctatgtcagagataacggctgtagtgtggccgctgaatcaaccaattttactgttgatctgatggaaaacgcggcgaagcaatttaacaacattggcgcgacgactcctgtcgttccatttcgtattttgctgtcaccctgtggtaatgccgtttctgccgtaaaagttgggtttaccggtgttgcagatagccacaatgccaacctgcttgcacttgaaaatacggtgtcagcggctgcgggactgggaatacagcttctgaatgagcaacaaaatcagataccccttaatgccccatcgtccgcgctttcgtggacgaccctgacgccgggtaaaccaaatacgctgaatttttacgcccggctaatggcgacacaggtgcctgtcactgcggggcatatcaatgccacggctaccttcactcttgaatatcagtaactggagatgctcatgaaatggcgcaaacgtgggtatttattggcggcaatgttggcgctcgcaagtgcgacgatacaggcagccgatgtcaccatcacggtgaacggtaaggtcgtcgccaaaccgtgcacggtttccaccaccaatgccacggtagatctcggcgatctttattctttcagtcttatgtctgccggggcggcatcggcctggcatgatgttgcgcttgagttgactaattgtccggtgggaacgtcgagggtcactgccagcttcagcggggcagccgacagtaccggatattataaaaaccaggggaccgcgcaaaacatccagttagagctacaggatgacagtggcaacacattgaatagtggcgcaaccaaaacagttcaggtggatgattcctcacaatcagcgcacttcccgttacaggtcagagcattgacggtaaatggcggagccactcagggaaccattcaggcagtgattagcatcacctatacctacagctgaacccgaagagatgattgtaatgaaacgagttattaccctgtttgctgtactgctgatgggctggtcggtaaatgcctggtcattcgcctgtaaaaccgccaatggcaccgctatccctattggcggtggcagcgctaatgtttatgtaaaccttgcgcctgccgtgaatgtggggcaaaacctggtcgtggatctttcgacgcaaatcttttgccataacgattatccggaaaccattacagactatgtcacactgcaacgaggctcggcttatggcggcgtgttatctaatttttccgggaccgtaaaatatagtggcagtagctatccatttcctaccaccagcgaaacgccgcgggttgtttataattcgagaacggataagccgtggccggtggcgctttatttgacgcctgtgagcagtgctggcggggtggcgattaaagctggttcattaattgccgtgcttattttgcgacagaccaacaactataacagcgatgattttcagtttgtgtggaatatttacgccaataatgatgtggtggtgcccactggcggctgcgatgtttctgctcgtgatgtcaccgttactctgccggactaccctggttcagtgccaattcctcttaccgtttattgtgcgaaaagccaaaacctgggatattacctctccggcacaaccgcagatgcgggcaattcgattttcaccaataccgcctcgttttcaccagcgcagggcgtcggcgtacagttgacgcgcaacggtacgattattccagcgaataacacggtatcgttaggagcagtagggacttcggcggtaagtctgggattaacggcaaattacgcacgtactggagggcaggtgactgcagggaatgtgcaatcgattattggcgtgacttttgtttatcaataaagaaatcacaggacattgctaatgcaggtacgcaatattgcctgatgcgctacgctatctacaaacccgcacgttagccctttgtaggccagataagaataaacaaagcgcactttgccgacaatccgaccagagcctgccaatggcaggctctggtgctcttttacgctaccatgctgataatcaacacaataatcagcccaaccacggagttgaccagctccagctgaccccaggttttcaacgtgtcttttactgacaggtcaaagtaacctttgaacagccagaatgaggcatcattaatgtgggtgagggtgttggaacccgcagccgtcgctagcaccagcagcgccggattcacgccaaccagctgaccagttgctgtatcaaggattgcagcactgataatcccggcggcggtcatcgctgaaaccacaccctgacccgtcgccagacgaatcagtacggtgatcagccatgccatgatgtagggcgagatattgccgtgggacatcaacatgccgatggtgtcaccaatgccggtgtcgatgatggtctgcttcagcacgccacccgcaccgatgatcagaatcaccattgcaatgctcttcaccgcgctttcaaaagcgttcatcacccactgcatatcgtgcccgcgcgcggtgccgaagagtacgaatgcaaccaccatcgcaataaacattgcaatcggcgaggaaccgataaagttaaccacttcccaggcaggggtatcttttaccagccagatattggcgatggtggtagagatcataatgatcgccgggatcagcggcaccagaatcgaaacgccgaaagagggcagattattcatatctaccggttgatctgctttcaggaatgatggcgttgggcgctcaagattgccgaggaacttcggcaggatcagacctgcgcagatgacacttgggatcgtcaccagtacgccatagatataaaccatccccatatccgcgccataagcattcaccagcgccaccggacccggctgcggtgggaacagtgaatgtgcggtagtggcagctgctactgccgggatcgccagtttcagaaacgggattttagcttcggcggcaatgacaataaccagcggcgctaacatgataaaggccacttcatagaacatcgccagaccgaaaatcaggccgatgataattaccgacagctgtacatagcgcagaccgagacgcgccagcagcgtatgcgctatctggtgcgccgcgccggagtcgaccatcaatttaccgatgaccgcaccgaacaccacgatgatagccagttcccccagcgtgttgccgaagcccgctttcattgtgtgcagcagcgacatcaaatccatgcccgccagcatcccgacggacagcgccgccactagcaaagccaccattgaattgattttgaacttcaaattcagtaccagcatcaggccaatgccgaataccacccagagaatgttaagcacatgcataacgttttaccttacctggttgaaccgttgttattttgggcgacatgttatgtaaattggtcaaccattgttgcgatgaatgtcacatcctctgatcaataaccatcgattaccctttgctgcaatttgcagcaacaaccgtgagagtgaaattcttgcgatgtggttaaccaatttcagatttcgggttgacatgtcttaccaaaaggtagaacttatacgccatctcatccgatgcaacgccacggctgcggtctggttgttcatccggatacctaaacaactccggggctccacgtctctttgctgtggaacccactatgtgaaagaggaaaaatcatggaacagacctggcgctggtacggcccaaacgatccggtttctctagctgatgtccgtcaggcgggcgcaactggcgtggttaccgcgctgcaccatatcccgaacggcgaagtatggtccgtagaagagatcctcaaacgcaaggcgatcgttgaagacgcaggcctggtatggtctgtcgtagaaagcgtgccaattcacgaagatatcaaaacccacactggcaactatgaacagtggatcgctaactatcagcagactctgcgcaacctggcgcagtgcggcattcgcaccgtgtgctacaacttcatgccggtgctcgactggacccgtactgacctcgaatacgtgctgccagacggctccaaagctctgcgcttcgaccagatcgaattcgctgcattcgaaatgcatatcctgaagcgtccaggcgcggaagcggattacaccgaagaagaaattgctcaggccgctgaacgcttcgccactatgagcgacgaagacaaagcgcgtctgacccgtaacatcattgccggtctgccgggcgcggaagaagggtataccctcgaccagttccgtaagcacctggagctgtataaagatatcgacaaagccaaactgcgcgaaaactttgccgtcttcctgaaagcgattattccggttgccgaagaagttggcgtccgtatggctgttcacccggacgatccgccgcgcccgatcctcggcctgccgcgcattgtttccaccattgaagatatgcagtggatggttgataccgtaaacagcatggcgaacggtttcaccatgtgcacaggttcctacggcgtgcgtgctgacaacgatctggttgatatgatcaagcagttcggtccgcgtatttacttcacccatctgcgctccaccatgcgtgaagataacccgaaaaccttccacgaagcggcgcacctgaacggtgacgttgatatgtacgaagtggtgaaagcgattgttgaagaagaacaccgtcgtaaagcggaaggcaaagaagacctgatcccgatgcgtccggaccacggtcatcagatgctggacgacctgaagaagaaaaccaacccaggttactccgcaattggtcgtctgaaaggcctggctgaagttcgcggtgtcgaactggcgatccagcgcgctttctttagccgttgatacccaccggcatggctgcgcgccgtgccggttccttcttccttgccgtcactctctgaagacggattctggagtttacgatgactactattgttgacagcaatctgccggttgcccgcccgtcatgggatcattctcgtctggaatcacgcattgtgcatctcggttgcggggcgtttcaccgcgcgcaccaggcgctgtacacccatcatctgctggaaagtaccgacagcgactggggtatctgcgaagttaacctgatgccaggcaacgaccgtgtgctgattgaaaacctgaaaaaacagcaactgctgtacaccgtggcggaaaaaggcgcagaaagcaccgagctgaaaattatcggttcgatgaaagaagccctgcatccggaaatcgacggttgtgaaggtattctcaacgcgatggcgcgtccgcagacggcgattgtctccctgacggtcacagagaaaggttattgcgccgatgcggcaagcggtcagctggatctcaataacccgctgatcaagcacgatctggaaaacccgactgcgccgaagtccgcgattggttacatcgtcgaagccttgcgtctgcgtcgtgaaaaagggctgaaagcgtttacggtgatgtcctgcgacaacgtgcgtgaaaacggtcatgtggcgaaggtcgcggttctggggctggctcaggcacgtgatccgcagctggcggcatggattgaagagaacgtcaccttcccgtgcaccatggttgaccgcatcgttccggcggcgacgccagaaaccttacaggaaattgctgaccagctgggtgtttacgacccgtgcgccattgcctgcgaaccgttccgtcagtgggtgattgaagataacttcgttaatggtcgtccggactgggataaagtgggcgcacagttcgttgcagacgttgtgccgttcgaaatgatgaaactgcgtatgctgaacggcagccactctttcctggcgtacctcggttacctcggcggctatgaaaccattgccgacaccatgactaatccggattatcgcaaagcggcctttgccctgatgatgcaggaacaagcgccaacgctgtcgatgccggaaggtacagacctgaacgcctatgcgacgctgctgatcgagcgtttcagcaacccgtctctgcgtcaccgtacctggcagattgcaatggacggcagccagaagttaccgcagcgtcttctggatccggtgcgtctgcacctgcaaaacggcggcagctggcgtcacctggcactgggcgtggctggctggatgcgctacacccagggcgtggatgaacagggtaatgccattgacgtggttgacccgatgctggccgagttccagaagattaacgcgcagtatcagggcgcagaccgcgtgaaagcgctgctgggcctgagcggcatttttgccgatgatctgccgcagaatgccgactttgttggcgcggtgacggcggcatatcagcagctgtgcgaacgcggtgcgcgcgagtgtgtggctgcgctgtaactaactgattaccctacagacttactggtcaatcaaactgatatttggttgaccagttttcgtttttttgcccacctgtacgtgccaacttccagtgctaatggtatagtttgagattaacgggtgccgtaaaattgcccgttgtaggccggataaggcgttcacgccgcatccggcaaaaatttgattaaccgcacctaacggacacaacaccatgaaatctgccacctctgcgcaaagaccttaccaggaagtcggggcgatgatccgcgatctgatcataaagacgccatacaatcctggcgaacggctgccgccggagcgtgaaattgcagaaatgcttgatgtcacgaggacggtggtacgtgaagcgctgatcatgctggagatcaaagggctggtggaagtgcgccggggtgccggtatctatgttcttgatagctcaggcagccacaacacagacagtccggatgctaacgtctgcaatgatgccggtccttttgagctgttacaggcgcgtcagttactggaaagtaacatcgcggaatttgccgctttgcaggctacccgcgaagatatcgtcaaaatgcgtcaggcattgcaactggaagagcgtgagctggcttccagcgcgccgggcagcagcgaaagtggtgatatgcagttccatctcgccattgccgaagcaacgcataacagcatgctggtggagctgttccgtcagtcctggcagtggcgggaaaacaatccaatgtggatccagttgcacagccatctggatgacagcctgtatcgcaaagagtggttgggcgatcacaaacagatcctcgccgcgttaatcaaaaaagatgcccgagcggcgaagctggcaatgtggcggcatctggaaaacgttaagcaacgtctgctggaattctcgaacgttgacgatatttattttgatggctatctgtttgattcatggccgctggataaagttgacgcctgacttattataataagcgcaagggtaaatgttccttgcgctttcttaaattaagaagtcgcaatgagtattactttgtaaattgcagggtattgtttagctatctgtataacctgaatgttagtactcattcttcctggtagttatttaccaatataattccactcaccattttttaattcaaacagttctggaagagatgacggttgcagagtcatacgtttgagtggtgcattttcatcacccgggataactttatatcccatttttgcatggatctccgcggtaccgggataggcttctataccaattattgggtcattacccaactcaatattagcattaagtaatgcggcaagggcgaatccggaagaatttgctacccctgttaccgtcattatctgatcaatatagatatcaatccttggctgctcattggtccatctttttgcctgagaagctggaagggttgaaatatatcctatcgtggttccggcataaccaggaacattgcaaccagggcctaatgttatttcatgaactgtatagtcctcaacaggatcgaaagggctcttcataaataaatttagccgtaaaccttctgctaactctgtggcagcatgcgcctttttacatatgccaccatatatttcgtctaaagctgaggtgattttcaagttccgatagagcatacgtcctgttgttgtaataccatcggattctctgcatgctcctgtcacataattaaatggccaggactctttactaatatcaagttttctaatttcgacagcgctttttccatcgtaattatggttattgccacgagtaagaggcggaagatagatgttttccaaatccatgcgtgcatattttaatttatgtgtaaactcactgtcgactattgggtgatgaaggaagtgattatctgtaataatttgactctgaagggcattgcttaatggcatagacataatagttaccttttatgagtatttcactgatgtttagaaaaatagataaatttttctgtagtaaaaagagaagtaaacaaatgacatgcatgtttctgttgtagtgatatcaactctacacggtgggtaatgactccaacttattgatagtgttttatgttcagataatgcccgatgactttgtcatgcagctccaccgattttgagaacgacagcgacttccgtcccagccgtgccaggtgctgcctcagattcaggttatgccgctcaattcgctgcgtatatcgcttgctgattacgtgcagctttcccttcaggcgggattcatacagcggccagccatccgtcatccatatcaccacgtcaaagggtgacagcaggctcataagacgccccagcgtcgccatagtgcgttcaccgaatacgtgcgcaacaaccgtcttccggagactgtcatacgcgtaaaacagccagcgctggcgcgatttagccccgacatagccccactgttcgtccatttccgcgcagacgatgacgtcactgcccggctgtatgcgcgaggttaccgactgcggcctgagttttttaagtgacgtaaaatcgtgttgaggccaacgcccataatgcgtgcagttgcccggcatccaacgccattcatggccatatcaatgattttctggtgcgtaccgggttgagaagcggtgtaagtgaactgcagttgccatgttttacggcagtgagagcagagatagcgctgatgtccggcagtgcttttgccgttacgcaccaccccgtcagtagctgaacaggagggacagctgatagaaacagaagccactggagcacctcaaaaacaccatcatacactaaatcagtaagttggcagcatcaccgatgcgaaagcaatcatggtaaatggtccgcagtttggctggtatgcgcctgcgtatacttatggtattggtctgcacggtgctggttatgatgtcactggcaatacaccatttgcctatcctatcctgggctggtttttggtcataatggtgtgatttcctggggatcaacggcaggtttcggcgatgatgtcgatatttttgctgaacggctgtcggcagagaaaccaggctactacttgcataatggtaagtgggtgaaaatgttaagccgtgaggaaaccattacggtgaaaaatggtcaggcagagacctttactgtctggcgtacggtgcatggcaacattctccaaactgaccagacgacacaaacggcttacgctaaatcccgcgcatgggatggtaaagaggtggcgtctttgctggcctggactcatcagatgaaggccaaaaattggcaggagtggacacagcaggcagcgaaacaagcactgaccatcaactggtactatgctgatgtaaacggcaatattggttatgttcatactggtgcttatccagatcgtcaatcaggccatgatccgcgattacccgttcctggtacgggaaaatgggactggaaagggctattgccttttgaaatgaaccctaaggtgtataaccccctgtcgggatatattgctaactggaacaattctccccaaaaagattatcccgcttcggatctgtttgcctttttgtggggggggcccctattaagttgtcaagcatgttatgacccctgcggggtataaaaagtcccgtcgcgcatcatggcgaacagaacgtcgcagcgtcgtctcgccagggcgataagcgcctgattgtgtcgttttccctgactcattttgcgggtgtagtaagccctggagagcggatccctgagcgcggcgaaggccgacaggaacaacgcccgtttgagagctttattaccccgtcgcgagggatgctcaccgcgtattgacgagccggatcgccgagttaccggcgcaaggccagcataagcagcgagatgtgcggcagaggcgaaggcgcggcaggcgacctcggtgaggagtctggctgcggtcctgacaccgactccgggcatactggtcaggaccgggtaaagagggtgagcaagaactcgctgttctacctcaagcgccacctcgtctctttgcttacgcagcgtgatgagctggagtgccagacgtggcagtactacggcagcggcattcgtgccgggaacgacgacggtttgttcggccagtgcctgagctatgtctgctgcaaggcgtttacccagacgaggcgcaagtttgcagagctgggctgccagcttcttctcacccagcgaagcccagcgaagcgagtttttctggtgagggatatcgctggagaagatcgagtaccgccgggtgctcaagtctcggaccgagaacgcgctccagtgccggatgtatctgggtcagaaggccgcggatacggttgctggcctgcgttgtctgtgcggcaagatcatcatcgaagccgcagagcatggagagttcggcgatttgctcgtcagccagtttcagcgtgcgtagcgcgtgaggcagggtacgggcagcttcggcaatgatggcagcgtcacgagcatcagttttagcttcaccggcgtgtaagtcggctatgcggcgcatggccagtccagggaggtatccgacaaggactccttctgagcgggcaacggcgacaggtaacgcaccgatggtagctggctgatcaacaaccagcagtatctgaccatgttgtttcaggtcagatattagcgacctgagtttgttttcgtcgttgggtaatgctttatcgaacaggcgtttacctgaacgattaatggcaacagcgtgatgcgtatctttaccgacatcaacgccgataaagatctggacggattcgtaatcgctggattcggtcattctgtctcccttgtatatgggttaaccagataaccacggggagcaggtaccggcatccacgttacagacggtcccggcaaaagtgcctgacctgacccctattagcggttaccagcgccccaccagacccggtgacatcaccccccggatcatggacgactgggggcagtaatcatgccgggtctggctggctaacaccccattataaggggtacgaataaagtaacggggcagatcgcgttacggagatcgaccgactgcttgagcaaaagccacgcttaactgctgatcaggcatgggatgttattcgccaaaccagtcgtcaggatcttaacctgaggctttttttacctactctgcaagcagcgacatctggtttgacacagagcgatccgcgccgtcagttggtggatacattaacacgttgggatggcatcaatttgcttaatgatgatggtaaaacctggcagcagccaggctctgccatcctgaacgtttggctgaccagtatgttgaagcgtaccgtagtggctgccgtacctatgccatttgataagtggtacagcgccagtggctacgaaacaacccaggacggcccaactggttcgctgaatataagtgttggagcaaaaattttgtatgaggcggtgcagggagacaaatcaccaatcccacaggcggttgatctgtttgctgggaaaccacagcaggaggttgtgttggctgcgctggaagatacctgggagactctttccaaacgctatggcaataatgtgagtaactggaaaacacctgcaatggccttaacgttccgtgcaaataatttctttggtgtaccgcaggccgcagcggaagaaacgcgtcatcaggcggagtatcaaaaccgtggaacagaaaacgatatgattgttttctcaccaacgacaagcgatcgtccggtgcttgcctgggatgtggtcgcacccggtcagagtgggtttattgctcccgatggaacagttgatcagcactatgaagatcagctgaaaatgtacgaaaattttggtcgtaagtcgctctggttaacgaagcaggatgtggaggcgcataaggagtcgcaggaagtgttgcacgttcagagataattaagcccgaatgccctcatattctggaggaatatgagggtgataaagtctcaggtattgtgatgttggagggctggttactttttgagtcccgcaaacgccgcccgaatctcatcctccggcaactgaatcccgataaacaccatcgtgctatgcggtttttcatcgccccacgggcggtcccagtcggcgctgtagaggcgctggacgccctggaacagcaggcggttaggttcgccgtcaatccacagcatccctttgtaacgcagcagtttatccgccgattccagcagcaggttttccatcacccgggaaacttcgctgatatctaccgggtaatccagttccaccacaatcgacgaaatatcgttttgtttgtccgcgataaagtggaaacgcggtttggtgctgacgacgttttcttccagcataaaaccgttggtgttgaacagaaggcccaggtcgatatcgccgtgggtaacggtgtagaccggtgcgcgggcgttgatgcgcgccaggcgttcacgcagtttctctgcttcgcctgcgacgtcggttttcgtcagcagaatacggtcggcgtagccaacctgggactgggcgatggtgaactggttcatctgctcatcggcatgtaccgcatccaccagcgcaatcaccccgtccagcaggtagcgctggcataaaatctcatgggagaagaaggtctgaataatcgggccgggatcggccatgccggtgcattcaatgaccagacggtcgaactgaatattgcccttgtcgagattatccagcaggtcgagtagtgcgtcttccagctcgttggagcgcgaacagcagatgcagccgttggtcagcgttttgatctgcgtggcgcggtcgccaatcagttgatcatcaacggagacttcgccgaattcgttttcaatcacggcaatctcgtagccgtgttgttcgttaagaatatggcgcagcagggtggttttgcccgcgcctaaaaaaccggtgagtagggtaactgcaatcgggttcatgctctctccattaacaacagcgcataccgcctttaccatcgccgccgtagcgcgcgttctggcgttcgcggaagaattcttcatagctcatgtacggcttgtcgggatggttggtcttcatatgctcgacgtagttgtcgtagtctggaatgccaatcaacatcttcgccgcctggccgagatatttttttgcctgtcctaagttaccaaacatagttcactctgataagaacaaagccccgccgaagcggggctaaacacggttagtggtgcgaagagatcttcacgccgccttccgggattggaacgtacggagtttctttgtcagtacgtttgtcgctgttacgcaccgcaagccaggttttgaaaccgtagaagatgatgctgtacaccacaatcaggaacagaatactcaggcctgcgttggtgtagttgttcacaacgatgtggttcatgttggcaatctgctgcgccgtcaggtcagtaccgttagcaatcttctctttgtactggcttgccatgtagaagaagccttccatctgcgggttggtgctgaacagtttcagacccagcgcccaggtggtgcagataagcagccatacagccggaacaacagttacccagatgtattgggtgcgcttcatcttaatcagcacaacggtgcccagtaccagcgctacggctgccagcatctggttggagataccgaacagcggccacaggctcttaacgccgcccagcggatcgaccacgccctgatacagcaggtagccccacagacccacacagcccgcagtaccgatgataccggcaaccagagagtcggtttttttcaggaacgggatgaagttacccagcaggtcttgcagcataaaacggccagaacgggtacccgcatccagcgcggtcaggatgaacagggcttcgaacagaataccgaagtgataccagaagcccatgtcagccatcggcagcactttgtggaacacgtgagcgatacctaccgccagcgttggcgcaccacctgcacggttcaggacagaaggctcaccaatgtctttcgcggtttgcaggatctgctctggcgaaatcacgaagccccaagagctgacggtcgctgccgcgtgtgcggtaacgtctttcagctgcgccatgatgatcggcgcgttctcgccacccatttcatgcaggttaggcatggtgatgccaaggccagcaggcggggtgttcatcgcgaagtaaagacccggttcgatgatggacgcagcaaccagcgccataatcgccacgaaggactccatcagcattgcgccgtagccaatgaaacgcgcgtcggtttcattagccagcagtttcggcgtcgtaccggaagagatcagtgcgtggaagccagataccgcaccacaggcgatggtaatgaacaagaacgggaacagagcacctttccacagcgggccagtaccgtcaatgtactgggtcatcgcaggcattttcagttccgggttcagcaccacgatacccagcgccaggccgacgataacgccgattttcaggaaggttgccagatagtcgcgcggtgcgaggatcagccacaccggcagcaatgcggaaacaaacgcatagccaatcagcgcgaaggtaatggtggtgtctttaaaggtcagtgccggaccccagtacggatcgtgagcaatcacgccaccgaagtagatagaggcaaccagcagcacgataccaatgacagagacttcacccacacgccccggacggataaagcgcatgtagatacccataaacagcgcaatcggtacggttgagcaaacggtgaagacaccccacggactttcggccagggctttaaccacaatcagcgccaggacggcaaggatgatgatcatgattaagaaacagccaaacagcgcgatagtccccggtactggtcccatctcttcttttatcatctcaccgagagatgcgccgttacggcgagaggagataaacagcaccataaagtcctgaaccgcaccggccagtactacccccgccagcagccacagcgtgccaggcaggtggcccatctgtgcggcgagaaccggaccgaccagcggaccagcaccggcgatagcggcgaagtggtgaccaaacaacacgtaacggttggtcggaacgtagttcagaccgtcgttgttaataaccgcaggcgtcgcgcgcgtggggtcgagtttcatcaccttctgggcgatgtacagactgtagtagcgatacgccaccagatacaccgacacagaggcgaccacgatccacagggcgctgacgtgctccccccgacgtaatgcaactaccgcgaggcagaatgcaccgatgattccgagaatcacccagggtatgtgcttgaatagttttttcgtatccatagtaaaacctggcattttactcgtcgtcttttggcttacaggtgcggcagttgcgttcgttcacccctgtcacttactgttgtaagctcccggggattcactcacttgctgccttcctgcaaaccaaaattcatagagtaatttgttaatcataggccgaagccgttctaggtttgcgttgcgtttgaggaggtaaattgaccgctatcctgcagtgatgttgccagagttacgcgcgcgtaaagtaaggtaaataactgagtggttattttagggacgtaagcggtcaggaatggcggtgagcggttgggcaagaattattcatcgggtggatatgtgattgagatcacaataaaaatgccccttcgacgaatgcgtgaaggggctggagcttaaatcgcagcttccatttccagcatcaccggatggaaacggcgtttaaagtagataagtccgtgaccttctgcactgaggatgatgtttttaatctccaccagatacaccagatgtgtgccaattgcctgcacatcgcggatctcaccttcaagactggccagcgaacctttcagcaccggctgcgccagcggacctttttgccagcatgagaggctaaaacgctcttccatcgccatgcctgtcatgcccgcgaagtggcgtgccatcagttcctgctcatggttgaggacgttgacgcacaacttaccgttgccctgaaaaaccgggttcatcgcactgttggcgttaatgcacaccatcagcgatggtggtgtatccgtgaccgagcagacggccgttgccgtaatcccgcattgtccggcgtcgccctcggtggtgataatatttaccgctgccgacaggctggccatcgcgtcacgaaagcgcaggcgctgttcatctaattgcatcttaacctcctgctgcgttatttcagcagcttatccagcatgttgatatcgtcgttgttgtgcaagtgcggcacagtccagccgttctggtcgtattccgacaggcagcgatcaaccatcgccatcatcttgtccatattgccggagctttgtgcctggcgcagacactgtaggcgaatctcatcctggctaccggagtagttgatttcatacagttcgtggcgaccaccaaactcgctgccaatggcgtcccacatcagtttgaggatcttgatgcgctggacgtgatccataccattcgaaccgcgcacatacttcgccagatactggtcgatctgcggattgttcaggtcacgggcactggaagggagatagatcaggccactggtaacgttgcgttcgataatgtttttgatcttcgcgtaggccattggtgccagtacgcgataggtttgcagtgcggcatgatccggtaaataagccccgttgacccacggcgtcgcttcagaacacatcgagtcactcaatgcccagaaggtgttgcgccacgccaccacttcaccgagatcggcctgtacaccacggaactccagggtgccggtacattcgagtgattttttcagcagtgctgtaatgaagtcgagtttcactgccaggcgcacacaggcttgcagcggatacatacgggcaaaaccgccttccattgtccagcgacggcagcgatcgaaatcgcggtagatcagtacgttttcccatgggatcagcacgttatccatcaccagaatcgcatcgttctcatcgaagcggctggagagcgggtagtcgtacggcgagccggtagcacccgcgaccatctcataagaggcgcgggagattaatttgacgccattggcatccattggcgcaacgaacatcagtgcgaagtccgggttttcgcccattacttgtgccgagccgaagccaatcatgttgtagtgagtcagcgccgagttggtggcaaccactttcgcaccgctaacgataatcccggcgtcagtctctttttccagcttgatgtaaacgtctttcactttatcggtcggcaaatgacgatcgatcggtgggttaacaatcgcgtggttaaagtagaggccagtttcctgaatacgggtgtaccagttacgggcgttctgctcgaactgaccgtaaaagcccggattcgcgcccagtgcgcaaccgaaagcagctttgtagtctggggtacggcccatccagccatagctcaggcgtgaccactcagcgatggcgtcacgttgctggcgcaggtcgtcggcacttttcgccacgcggaagaatttatgggtatagccgccgctgccggtgtcggtgttccagcacagagagtcctgcatctccggtttgtgcagcgcgtcgtacagttgggcaacagacgctgccgcattacgaaatgccggatgagtagtgacgtctttcactcgctcgccatagatatagatctcgcgaccatcctgcaggcttttcagatactcttccccggtgaacggacgttgggtactggcgcggaaatcttctggtttcatgtcgacctctacagtattaatcggaatacgattgttaattttgtgtgttgtttttgttattcaattgaagcttgcaggggcgattacgggaagacacttttgggacaatggctggtacttttcaggtcgggtacggttttgtgatcgcggtcgcttttagcgatttttgacgttactaaatccccttgctccaggcggagaaaggggaatagcaggtggtgcctggtttcccgttaaggctaagggattttcacgtcacaggtacttttttggcacgataagcactgggcgagcaaccgactaagcgattaaaaaagcgcgcaaaataagctggatccttaaaaccgagttgccaggcaatattgttcacggcgttatcagaaaacagcagcagccgcttggcttctcgcagctgcctgtcgaaaatcaaccgttttggcggacggttggcaaagcggcggcagatgtccgtgaggcgtgattcggtgatatgcagttcgttagcgtaatccggtactgtccagtgctgatgaaaatggctttcaatcagcatattaaaacgctggaacagttttaattctccgcgcatcccgctggcggcatggtcgtcgagttttgcattacgcagcagtagggtgaacactgcctgtgccagtagcgtcagggtgtgttcccgtccaggcagttgttccaccgattcccgctctatcagttgccaatagtgttccagcgccgccagttcgtcgggtttatctgccagtgacaggcaaatccccggcaggccgaaggtttcccgagtgcctggataaagaacttccagcaggggccagatcagatcttcccgtaccgtcaacacatgaccgtcggcgtcagactccgtaataaacgcatgaggtatgaggtgtactggcaatagcggacactaccatttgttctttttttaagcagccatctgatgatatttttccctgaaggctgccggggagatattccccagacgagagtgacgacgctgacgattgtagaaaatctcaatgtattcccgtattactgagatggcttcatcccggttattaaaacgatagtggctcaggctctcatttttcagcgttccccagaagctttccatcggagcgttgtcgtaacagttacctttacgcgacattgatgttttcagaccagactgctcctgtatgacccggtaatcgtatgcgcagtactgtgaacctcgatcagagtggtggattagcccggcaggtgggcgctggctcctgagcgccataaacagggctttacctgtcagctcttttgtcatgcgctctcccatggcgtagccgacaatttcgcacgtataaacatctttgatgccagcgaggtacaaccatccctcctgtgtggcaacatacgtcaggtccgccacccagacctgatttggtgctgtaggagcgaacgtctggttcagcagatttggcgcaactggcagattgtggttcgagttcgtagtcgctctgaacttgcgtttctgcttacagcgtagccttagctccttacgaagacgtgccagtcggtcacgaccaacgatgatgccattctctgccagctccgtctggagccgccgggttccatatgtttcgcgagtgcggatatgtgccaccttaatctccagttttagccgctcatcactttgttttctgtctgagggttcatgctgtacccagttgtaataaccgctcctggatacaccaaatacctgacacatcgcttcaatgggaaattgttgtcgccattgttcgattaacgcgtatttttcagcgactcctgtgcaaaatacgctgttgctttttttaatatatctcgctcaaggcgagcttcatttaacgccttacgcagttgcagaatttcagattccagttcagccaccgtgcgggaaccaggagtaccgagcccttttctggcggcggtaacccattgtcctaaagtgccttcaggaagagataatcgggaagcgccttcactgatcgaaagttgattttcaggaaccgttctgacagcttcggctttgaactctttagagtaacgttgggtttttctgctcattattagctccttctgatgccattctatttcaggaaggagtgtccgttaaactcaggctacctcagtactgacggcggcgtcaggacaaacaggggcgcttccaccgagtagcgatgatcgtcaagctgtagctcaatctgtccgctattgaggaaatgcatctgaaagtactgttcgtggcgatgtggcagcatatggcggccaaaaaatgccgccatgcgggcgaacgactgataatgcacatcgtccgtgcccaggctttcatcgtactctttgctgatatcaatattggcaatctgacggtcacacatcgtcgttccttacagggtcgctcgcggacgggaggactgcattggaatcgcccagataatccccgcaccaatcaccagcagcgcggcaacaaaccacaatccactgttaaagctgccggtcaaatctttcaaccagccgatcataaacggacttaacgctgaaccaatgttgccagtggcgttgatcaccgcaataccgatcgctcgtgcccgcaggctgatggactgatccggtgttgtccagaaaatcgccattgcgctgaatgatccggtcgaagccataatgatccccagcatctggatcatgttgtgatcagttgccgaagccagtaaccaacctgcggcagcgaacaaataaggaagggcggtgtgatgccttcgttcctggcggcgatctgagtgacggctccagtagaccatcccgagaatggtacaaatctgcggtacggcggccagcatgccgatggtgatattactgctgccctgattaaaactttgcaggatctgcggtgtccagatgctgatcgcactaagtgtgttggtcaggcagaaatacgccagggtatacatcatcaccaccggagtgaagatctcccgccacatactgcgttgttgcatggcgtggtggctgatggctccctctggctgaaccagcgtcagacgatcgttatccatcatctcttgcaggcattttttgtcttctttcgtcagccacttagctttgtccggtgagtcatcaagccagaaccacaccatgacgccgagtaataccgacgggaagccttccagcaaaaacagccactgccagccttttaatgccatgacgccatccagcgacaaaatgtagccggaaacgatcgagcccaacgctgtcgttaccggcattgctaccataaacaaggcgttggcacgggcgcggaaataggccggaaaccagaaggttaaatacagcagaataccaggcagaaagccggcttcggtaatgccaaccagtatacgcagtacgtacaagctggtggggccagtggcaaacatggtggcagtagaggcgatgccccagagcaccatgatggtggcgatccagcgccgcgcaccgacaatactcagcataatgttgctgggaatgccgaagatgacataagcggcatagaacagggtggtagcgaggccaaacatggtggcgctcagaccgaggtcgcgtcccatcgtgagtccggcaaagccgatgttgatgcgatcaaggaacgagaagataaacagcacgaacagaaagacgctcaggcggcgaaatagcttcttaataaccgcctgttgtccggcagtcagcgctttatgctgattcgccggatcgatactctccggtatggcaggtgaggtgtcgctcatttttcttcctctaatgggatttttgtagggtacgacaaggtttatggcggatgcggcgtaacgccttatccggtccgcgatttggtacggctttttgccggatgcggcgtaaacgccttatccggcctacggtttggtgcgagtgtaggccggataagcgcagcgcatccggcattaatacacgccgggcttcacggcggtggcctgcgcaccaaaccgtgctgccagcgcttcggcggcgcgggcgagcagggtggtgtcaacgccgacggcgacaaacagcgcgcccagttccagatagcgttttgccagttgctcattggcgatcaggatccccggcgctttgcccgcttcgcggatctgcacgatcgcctgctcaatggcggcctgtacttccgggtgctgcggattaccggcataacccatatcggcgctcagatccgccgggccgataaacacgccgtcgacgccttccacgtccagaatctgcggtaagttcttcattgcctcacgcgtttcgatctgcaccagcacgcacatttgatcgttggctttttgcaggtaatcaggaatacgattccagcgcgaggcgcgggccagcgcactgcccacaccgcgaataccggcggggggataacgggtggcgcgtaccgcttcacgggcttcgtcagcgttttgtaccatcggcaccagcaaggtttgtgtgccgacgtccagcagttgtttgatttgcaccggatcgttccacgacggacgtactaccggctggctggggtagggcgcaatcgcctgtagctgggtgagcacggtttgcacgttattcggcgtgtgctcaccgtcgatcaacaaccagtcgaatcctgctccggccagtaactctgcgctgtagctgctactcagccccagccataatccgatctgcggacggcctgctttcagcgccgctttaaagctgttttccatcgttctctccttaaacaaagcggcagctaatggaacccatgttgccgtaatcgacgtggaaggtgtcgcccttacgcgccggaaccgggcgggtgaacgaaccaccgagaatgatttgcccggcttccagttgtacgtcatacggtgcgagtttgttcgccagccaggccacgccgtttgccggatgattcagcacgccagcggcgacgccggtttcttcaatcacgccattgcgatacatcagggcggagatccaacgcagatccagttcgtctggtttgatcggacgaccgccgaggatcaccccggcgttggcggcgttatcagaaatggtgtcgaacactttgcgcgggcgctgggtttccggatcgatgttgtggcagcgagcgtcgatcagctccagcgccgggatcacgtagtccgtggcgttgtagacgtcgaacagcgtgcagtttggcccacgcagcggttttgccagcacgaaagccagctccacttcaatgcgcggcacgataaagcgatcggtcgggatatcgctgccatcgtggaagaacatgtcatccagcagcgcgccgtaatccggttcgctgatctgcgagcttgcctgcatcgctttcgaggtcaggccgattttgtggcctttcagcgtgcgaccttcggcgattttcaggcgaacccattcacgctgcaccgcgtaagcgtcttcgatggtgatctccgggtaatccagcgagatcgcgcggatctgttcgcgctgtttttctgcctgatccagacgctgggcgatcagggtgtgggtgtgtttatcgaacatagcgatatcctgtggcattgccggatgcggctgcgccttatccggcctacggtgtacggtttggggttttgtaggcccggtaagcgcagcgccaccgggcaatctgcgcgctacttaaacaatgcgtgcacgttgttttgtttaaaattcagcgtcggatgcagctcttcaatctcaaacgacaacgccagcaggcggctctccatcagggcggcgaagtgcgttttaatcagttcaaacagcatttcacccgcctgctggcggctttccaggctgcgacctgcgccgattttcaacgtcatatgcacgaaggcataatcacgctgcccgtcggccatctgccaggtatcgacccaatgcacgcggctgcgaatacccgccagcggaaaaatacccgtggctgccagcgtcggattcactttggcgaacaaccccggcaggtcggcttcttcgcggatgttgtcactgcatttaacgataaagtgcggcataaaacgtccttacgcgggaagcgggaaaacagcgttaacctgaccggtgccagagcttgggaatagctcggtgataaactccaccttgccgtcgtatttatcccagccgagcatccccagcagcatcaccgtgtcgtgcatattgccttcgccgtagcagtagtcggcgtactccggcagcatattgcagaactctttgaactggccttcgcgccacaacttcaccacgcgctcgtccatctggcggtcgaactcgcgggtgtagctgttcatcccttcttccgcacgctgatcgtcaataaagcggtgcgataacgaaccgctggcaaggaccgccacggtgccgtcgtactgttcgatcgctttcagaatcgcttcgcccagcttgcggctgtcggcaaaatcgtgaaccgtgcagaaagccgaaatggagaccactttgaagtgcttgtcttcattcatgtagcgcatcggcaccagcgtgccgtattccagtttcaggctgggaatgttgtgcgcttttgcccgcacgccgagctttaaggcttcatcggcaataagctgccccaactccgggttgccctcgtagttgtaggtcatatcgcggataaaatgcggcagctcgttgctggtgtagacgccttcaaaatggtctgcacagttgatgtgataagcactgttgaccagccagtgggtatcgaaaacgataatggtatcgacgcccatttcccggcaacgcttgctgatctctttatgcccgtcgatcgcgccctggcggcaaccgtggtttttccctggcagttcagagtgatacatcgacggtacgtgcgtgatcttggcggctaacgctaacttacccatatcagactccccatttcggaattggatggtcgcccatggaaatgcagacgttcttcatttccgcgaacacttcgaagctgtactcaccgccttcacgcccggtgccggaggcttttacgccgccaaatggctggcgcaggtcacgcacgttctgggtgttgacgaacaccatgccagcttcaatgccacgcgccaggcgtaacactttgctgacatcctgtgtccagatgtacgacgcgaggccgtactccacgtcgtttgccagacgtaagccttcggcttcgtctttaaacggcagcaggcaggcgaccggcccgaaaatctcttcctgggcgactcgcatacggttatcaacgtctgccagcacggttgggcgcaggaagttgccgcctttcaggtgcgcaggcaggtcggacggtttatccgggccgcccgccagcagggttgcgccttcttcaatgccgagacggatatagccggagactttttcccagtgctgctggctaataagcgcgccaacctgggtattcggatcgttcggatcgcccacgcgcagacggttggcgcgttcggcaaagcgtttaacgaattccgggtagatgctttgctgaataaagatgcgcgaaccggcggtgcagcgttcgccgttgatcgagaagatggtgaacagggcggcgtccagcgcgcgttcaatatcggcatcttcaaaaatcagcaccggcgatttaccgcccagttccatggagtattttttcagcccggcgtttttcatgatgttgcgcccggtggccgtaccgccggtgaacgacacggcacgtacgtcatgatgacgaaccagcgcatcccctgcggttgcgccgtagccctgtaccacgttcagcacgcctgccggaatatcggcttccagcgccagctcacccaggctgtcagcggtcagcggggagagttccgacattttcagtaccgcggtattgcccagcgccagacacggcgcgaccttccatgtggcggtcataaacggtacgttccacggcgataccagcgcacaaacgcccaccggctgcaccagcgtgtagttgagcatcttgtcgtcaaccggataggtcttgccgttcatctgctggcagacttccgcgaaaaattcaaagttgtgggaagcgcgtgggatcaacacatttttggtctgatggatcggcaggccggtgtccgcggtttccatcgcggcgatctctggcacgttctggtcgatcagatcgcccagacggcgcatcaggcgcgcacgctctttcatcggcagattggcccatttcgggaacgcctctttcgctgccgctaccgcctgattgatctccgcttcaccgccagaggccacatccgccagcacttcacccgttgccggattggtggtctggaagtagtcgttacctgcaacatttttgccgttgatccaatgatttacttttttcatttcgctgtatcctcactcacaattcggttcaccaggcggcccacgccttctacttccaccactacttcatcgccaggcaccacgtcagataagcctttgggtgtgccggtggcgatcatgtcgcccggattcagggtcataaattcacttaagtaggcgatcaggaagggcacgctgaagatcagatcggcggtggtgccttgctggcgtaactcgccgttgacgaaggtgcgaagggtcagattatgcgggtccgggatcgcctctttcggcacgatggttgaaagcatcggcgtcagtccgtcgcggctttttacccgcaggttagggcggtagtagttttccagatagtcacgaatggcgtagtcgttacacacggtgtagcccgcgacataatccatggcatcggcttcgctgacgttacgcgcctgtttgccaataactaccaccagctccgcttcatagtgcatgtattcaatattgtttggacgcacggaggtctggttatcgccagtgagggtatttggcgctttcaggaacaccagcggttcttccggtggcttaaattccagttcgctggcgtggtcggcgtagttcaggccgagggcaaacagcgtgccgtgcgggtgtggctgcgttgggaagctcttgtgcgtggtcacttcacgttcgtccactaccggattttccagcggcgggaaaccttctgcgagaacacgaacgcgatcgcctggctgtatttccacgcgcgcctgtggcgtgccgagcagaatggcgtcgcctggattcagcgtggcaaattcgctcagggcgctcagcaactgcgcggcgttacgttgtaaatcggcggtattccagtgatcggcaggacgcccgttgatctcggtatagatggtcagattatcgacattgctgagagccacggtttcgccaatggggcagaatccatcacgacattttgctttgattgccgggcggtaaaagctctcttccggcaggctgacgtcgttagccagcgcatatccggcgatgtactctgccgcatcttcttcacgtactttcgtcgccgtttttcccacaatcagcgcaacagtcgcaccgctcagtaccttttcaccctgtggaaagggaatcggttcaccgcaaccaatcaccgtattgcgcggtttaataaaccagaccgcagttttaggcggggctttgtagggggattgctggaacgcttcctgccatgcatcaagttggctgcgatggttcaacgctacggcgaagatagtgcctttcattaccactcctcggattcgatcatcttaatcattaatatgttaatgattgcttttattcccgattgcgtagtttggcaaaagtaagtgatgtaaatgtgatctaattaacaagctatttacatttaaagataataaaatattaaatatcagtaagttaataaaatatcatcaattttgataaaatcaggaattgcaggggcagcgcagtcccggtaacgtgacgattaactgtttctatattaatgattttgaatttttcaggggaaagataatgcacgactcactaaccattgcgttgctccaggcgcgagaagcggcgatgagttattttcgcccaatcgttaaacggcataatttgactgagcaacagtggcgcatcgtgcgtattctggcggaaagcccatcaatggattttcacgatctggcgtatcgcgcctgcattttgcgcccaagcctgaccgggatcctcacgcggatggaacgcgacggtttagtgttgcgattaaagccgatcaatgatcagcggaagctctatatctcgctaaccaaagaggggcaggcgctgtataaccgcgctcagacacagattgaagaagcctatcggcagattgaagctcagtttactgccgagaaaatgcaacagttaacccatctgttagaggaatttattgctctgggcaattcccgacaagaagccatcccgggcgataatgaataactttttagtatctgataaccagcgcctggtttttccatggatggtgggttacaccttttcataaagtttttgctttccaggccgaaaatcttgcatcggtccacaggaaagagaaaccatgttaaaacgtatcaagatcgtgaccagcttactgctggttttggccgtttttggccttttacaactgacatcaggcggtctgttctttaatgccttaaagaatgacaaagaaaatttcactgttttacaaaccattcgccagcagcaatccacgctgaatggcagctgggtcgcgttgttgcagacgcgtaacaccctcaaccgcgcgggtatccgctacatgatggatcagaacaatattggtagcggttcaaccgttgctgagctgatgcagagtgccagtatttcgctgaaacaggcggaaaaaaactgggcggattacgaagcgttgccgcgtgacccgcgtcagagcaccgccgcagcggcagagatcaaacgtaattacgatatttatcacaatgcgctggcggagctgatccaactgttaggtgcaggcaaaatcaacgagttctttgatcagccgacccagggatatcaggacggtttcgagaagcagtatgtggcttacatggagcaaaacgatcggctctatgatatcgccgtcagcgataacaatgcctcctacagccaggcgatgtggattctggtgggcgtgatgatcgtcgtactggcggtcatcttcgccgtctggttcggtattaaagcctcgctggtagcgccaatgaatcgcctgattgacagcattcgtcatattgcaggcggcgatctggtgaaaccgattgaggtggatggctctaatgagatggggcaactggcagagagtttgcgccatatgcagggagagctgatgcgtaccgtcggtgatgtgcgcaacggggccaatgccatctatagcggtgccagcgaaatcgccaccggcaataacgatctctcttcgcgcaccgagcaacaggccgcttcgctggaagagacggcagccagcatggagtaactgaccgcaacggtgaagcagaacgccgaaaatgcgcgccaggccagccatctggcgttaagtgcttctgaaacggcgcaacgcggcggcaaagtggtagataacgtggtgcagactatgcgcgatatctccaccagttcgcagaaaatcgccgatattatcagcgtaattgacggcattgccttccagaccaatattctggctttgaacgcggcggttgaggctgcgcgtgcgggtgagcaagggcgcggttttgcggtggtcgcgggagaagtgcgtaatctggcccagcgcagcgcccaggcggctcgtgaaattaaaagcctgattgaagactcggtggggaaagtggatgttggctctacgctggtcgaaagcgccggggaaacaatggcggagattgtcagcgccgtgacccgcgtgacggacattatgggcgaaattgcttctgcttctgatgagcagagccgtggtatcgatcaggttggcttagcggttgctgagatggaccgggtaactcaacagaacgccgcgctggtggaagagtctgccgctgccgccgccgcgctggaagagcaggccagtcgcctgaccgaagcagtggcagtgttccggattcagcaacagcagcgtgaaacatcggctgtggtaaaaaccgtgacgccagctgcgccgcgtaaaatggccgtggcagatagcgaggagaactgggaaacattttaatcgccatgaaaatgcccgataagcaaaatgttatcgggcataaggagattaatctttacgtgggtcgttgatcggctgacgaaccaggaagatgtacgccagtgcccccgctgcggtgacgcaaccgcagatgattagtgccagacggaatgagtgggtggtatcaacaataaaaccagtaatgatcggcgcaaaagaggcgcagatgaagctggcaaagttctggatactgcccaccgacgcagtcatgcgagaagcaactgcgacgtggatcaagccccagcaggatgttccggcaaagtgaatacagaacagtgccatgccaatcagcagaaccgctgtcatggatgttgtcgcttgcggtacgaccagcgtaaaggcggcagaacagaacatcccggcaataatgcagatcttacggcttttaatcggagccattccccctttgaccagccagtcagtaacgtaaccgttgaccagcatcccggcagccccaaacaggaaagggatagccgccatcaaccctgtgctttttaaatccaggttataggctgtttgcaggtaaccaggaagccaggccagatacagccacgcagtgtagttgatgccactgaatccgagcatcattccccacattgtacggttacggaacaggctgcgccattcggcaaaactgagcggatctcggcgggcattgacgctacctgcattgagataagcttgttcaacggcagtcagttctacgtgctcgcggttgcgatagagcatataccagccgatggcgagaaaaatccccagtacaccaatggtaataaacatcccgcgccagcccatcaccagcatcatcgccgccagaatcggtgggcttacggcaacgccaatggtagaagctgcgttgaagaagcccatcgggcgtccgcgctctttgatgttgaaccagtcgttaatgacttttacaccgcatgggttcatcggcgcttcaccaatccccataccgatacgcaccaacacgaactgcgtaaagttgtgcaccatgccagacattgcctggaacagtgaccagaagaacatccccagtcccagcatcaggcgtgggcctttacgatccaatagtgggccgcaaggaagttgcgcaatcccgtaagcgagtgaaaacacggagagcaaagcgccgatttcggtggcacttaatcccaattcttcacgaatcgttaaatttgctaccgacagcgaactgcggtcgagataattgattaccgccgcaaaaaataataacaacatggcggtggtttgaatgcgtttaattcgggtactgcgttgaactaatccatctggtggcacgggaatatctgccgacgaagatggagtaaatgaagaacgcggatcgagggtgatattttctttttccacgccggactcctgtatttataattttaattgtttacgtaattgtgaattacgcaaggttgacattaacggcaggttaaagttttaggactttactaccgctcacaaaaacatttttagtcgactgattgtgagcataggtaagcgggaatttcccggtatttatcttttgataaaaccgtgcacccgctaatagtttgctgtttttaatccgtacttaatgagcataacgcgtgttctcattaatggatcgaatcattgattgtttagctgaattcaaatggttacggagcgcaagggtggcatcaaggtcactgcggcaaatcagagcgctgagaatggtcatatgctcatcgacggcaatgatattgcgctgtttaagatcgctttcgtcccattgatagtgaaaatgaaagatgactgagatgatctcaagcgattgatcaaaaaagatattgtcggcagctgaaagcagtaaggagtgaaaatctctgtcaagttgcgagaacatgcgaaagctattgccgatgttgtcacgcagtagccgatgacgttcgagcatggttttcgcctgcagccagcggggatcatgatcaggcaggttgagaaagtgctgaagtgaatgtgtttcgagcatttcgcgtagctcaaacagctgctcggcgtaggattgatcgaattgcttcatgctccactggccgcgcttttcgctgtgaataagattataacggccgaattttaaaagatattctcttactacaaccgggctgacacccgcggcccgagccagttgcagttcagaaaacgtttcccctgggcgtaactggcgctggtttatcatcgtgaaaaaagcctgctcaaacactttgttttgttcactcattgaagcggtagtacaggcgaaaccgtcatcatggtcaggtttacgcgcaataacatagtcgtttccaacctgcgtcaagacgccgcattcgcgtaagtggctgagaatatgacgcactgtggtgcggctgatgttgtacatttccgccagcgcactttgcgatggaagtggggaagggatatgaccccgcgccatatcatcaatgacctggttaatcacattgtggcgtaaattttgtgaacgactcatattttcctccttgtgagtccattaaaacccgatttaaaacatttttatgcgtgtgttttcacaaaacagattttccgttccgctgccatttttcattttcattgatatctaaggcaacaaaaaatggagagccgaatcatgtctacgatgaatgttttaatttgccagcagccgaaagaattagtctggaaacaacgcgagatacctattccgggtgacaatgaagcattaataaaaattaagtctgtcgggatttgcggtaccgatattcatgcctggggtggaaatcaaccattttttagttatccacgtgttttaggccatgaaatatgtggggagattgttgggctgggtaaaaatattgctgatcttaaaaatggtcagcaagttgctgtgatcccttatgttgcctgtcagcaatgcccggcgtgtaaaagcgggcgtaccaattgctgtgaaaaaatttcagtcattggcgtgcatcaggatggcggttttagtgagtatttgagcgtgccggtggcgaacattttgcccgcagacggtattgacccgcaggcggcagcattgattgaacctttcgctattagcgctcatgcggtgcgtcgcgcagccattgctcccggcgagcaggtgctggtggtcggggcggggccaatcggtctgggcgcggcggcaatcgctaaagccgatggcgcacaggtggtggtggcggataccagtccggcgcgccgtgaacatgtggcaacgcgtctggaattacctttactggacccgtcagccgaagattttgacgcgcagctacgggcgcagtttggtggttcgctggcgcagaaagtgatcgacgcgacaggtaatcaacatgcgatgaataacaccgtgaatttgattcgtcacggcggcacggtggtatttgtcggcctgtttaaaggtgagttgcagttctccgatccggaattccataaaaaagaaacgacgatgatgggtagccgcaacgccacgccggaagattttgctaaagtcggtcgactgatggcggaaggaaaaatcactgctgacatgatgttaacccatcgctatccgttcgccacgctggcagaaacctacgagcgcgatgtgattaacaatcgtgagttgattaagggtgtaattactttctgataaggcgagattattaaagttgccatgcagcgtccggggaagtgttgggcgctgtttttttctgtttctcaatgatgttttgtaggccgcagaaggtgtgtaggtcgcaccttatgcgacctacacatcagtcaggaattatccttcacgttccaccactttaatttccaccatgccgatcccgagcttacgcggcgagtgtccgaggatattcccttcgttggttgagacaggttccggcggcacaattaccagtgtgtcggcatcggttgggttatcgaaatgcagtgtggtggtggtcacttcattgcccagcacaagggtttgttcttcattgcctacgcgtaccggaataggacggctggcgttattgccgtatgctttggcggtaatcaccaggtcaaatttctttggcagcggatgcttgtactcgatttttacttcatcgcccagctgcgcgttggaccagcggccccacgactctggacgggaaatcccactaaactgtttcacctcttctggcgcaccggcgacgttgaagatgaaactgtcggctttgtagcgaatatcgttatcaacaattttcagcgtatcgacattgcctttataacgcgccatgtcgatgaccgtatctttaaatgccgttttgccctgccatgttgttttgtcaacatgctgaacaatttgctgaccgccaagctgcccttgcgagacacaccagtcggtggagagtgccagttccggagcccagagttgtgccatcttatagcaacggtcaacccagacgaaattgtcgcgtggagcgaaatcggccagctggaaacgcagcggtgctgagtattcgctttccggcagcggttccacgcgtttgtctgaaacccgcaacagcagcggcaaacggaaatggctacccgagaaggcaatcatgtttttctgctggtcgatggtgaactctttcatctctttagggaatttccacaggcggatgatatccggcttccacgccaatgttttctctttgatattgaggaagatttccgacatcgactgcccggataaactgctacgaccaagtccgagatagttatcgccaccgagaatgtccagcaccgtcgcgccgttatccatcgtgttacgcttcactgccagcgtctcttgctgcggcttgtcgccacgaatgacaaaaaacaggttattgcgatcctgcttattgaggtatttccacgccgtgttgttcatcgctaaatggtcagaagagacgacgatgacggtatctttaaaccacggtgacgctttgattttgttgataaacgccgcgatattctcctggctgcaacttaccgcgctgaatgactggttcggcttaccgtcaaaatcatattttttgcggttacaggtacgcgagataaaaccatccgggtgatgggtatcgactgtcagggtaaacagtgagaatcgctgacctgagcgggaaagctcttcaaactttttccacgcttcatcgagaacggtatcgtcgtagaatccccagtcgttgcgatagtgcgggtcggccaccacgcttttcagctcttctgagccgtataagtggtcgaagccatgcgacttcaggaacacatctttaccggcaaaacgcagattcgcgccctgcacgaaatagttctgataacccgagtttttcaggatatcgcccagacagatgttctgcgggaagaagctggagacagaggcggaggcgttgccttcaaagggggcaaacagcggtatgccgcactgagaagccaccatgcccgcaatcgtgtaatccgttcctggcagctgctgcgtgtggctgaaatccaggccttcatttttcaacgcgcccagttcaggcgtgagatccgggaaagcttcgttatcaaaataggtccgctcgagactttcgccgtagatataaaccaggttgagtttcgggtcagggatagttttcgacggctctttataataagccgcaaagtccgggtcgccatcgcgtgactgggatttcaccagttccgttatctgacgaaatgccgggctggcgtccaccgaacccagcgccagtaagagcgccagcaggctgtaaccaaaatggtgcggatgatggcgacgacggcgcaggatccagcccagcgcaccgaacaccgctgtcagccccagcacaatgccgatacccggcaggatgtatttgctgacgccagcaccggtcaggctgttggttaaggtatagagaaccgcgtcgttaataccatcgccagtaaaatagtcgctggcaaacagggtgatatttaaaacgacaaatagccccagcaccgttaatgtggctgcaaaccaccaggtgttacgtcccgctttccatgcgtaaatcagcacagaggcgagaaaaagggcgaaagagagtagttctgacaacgggcgatcctcactaaaccgggccgtttagccaacgtttaagctttttgagaagcacaatgtaatggcgtcgccatattgctgcaattctagtgtcaaaaaaatgcgatgttgttaggaattagtttataaacagacttttttgatcgcggtcgcttcccgtgtaacagggggaaaaccgtccaggagcagggaaaagggcaggagagagccgcgtcagccgggtaacagctaaaacgcggcgtttcgcggttcaggaaatgaagttcagcccctgctttaacaccagatcgcaggctttggttttcaccttttctgccagcggagtcgttccgatgttatccagattgagttgctgaccatctttggttttcagcaaaccctgaatgccatccagatagttggtgtcttctttttgctcttcactgttcaggcccagcttttccagcacctggttcttgatgttttcggcatcggttaccgacgccagcttttgcttcgcgcagtattgcagaatgcctgcggcgttgttcatgttatctgcgcttaaggcctggttcccgctgctaagcaagttagttaatgacgcgagcgaccaaccgccttcctgtgtcgtgctgttttggttgccaagttcgctggcggcgctggagagcgcatctttccaggacgcagcatgcaccccggtggaaattaatgcgctggcggcaatggcacagcacagaagatgtttaacagttttcatcatcattactcaaggtggaattgtgtcgcagtataccgccagaaacggggattaatactctttacctgttacccggctacggtagctatcccagttgaagatcacccacaaactgttacccaggcgcatacggtccatcacgcgttcgcccagcaacttggtcatctcttccatattactgttggtcagcatcccggttgggcgtttggaagaagagcggcgatcgacgatctggttgatgatcactttttcgtatttcgattcggtctgcacgccgatctcatcgatcaccagcagatcaacgttgctcagatcgttaagcagttgttcttcactggtaccgctattcctgaaggtatctttcatcgccgacataatatcggccacggtgatgatcaatacggatttaccgcgtagcagcagctcgttgcagattgccgccgccagatggtttttgccggttcctggcttaccagaaaagatgaagctggcgatgttgccgtcaaactcttcgacgtactggcgcgctttgcttaacgcattcatctgcccttcacactcaacgcgatagttctcaaaggagcagttctgatgcagtggccgaataccggagcggttaaaggtgcgctgcattttcatcgcccgattttcacgttcgagagcggcggagcggatcgctccttgttctttctgccaggccagtagttcttcacccgttttgaatgcaggtttgatatgggcaggcatcattttttgcaggcgttgcatcaggtcgccaacgtttttcatcgttaccctctgaatcctggtggaatttgactgtcaggttcgctgaccgtattcacatctcgtttcggcagtccgccgttgctggcacgaccgatttgcaggctgcgcgccagtttttgttgccactgcacatggtgaaagactttaccttccgcctgccagtaggcaatgaatgaggccagttcttcggtggtcaccggctctcttagtgccacaccccatagcgccgccaggcggataaaatcggcatcgggttgccagtccggatacatggcgaatttccccatgggtacagcaacgggagcggcttgcggttcctgatagagttgatcgtccagagcgacatcgcttcccggacgcgccagcttttcttccagcgccagcagttcagccaggcgtgcaggcgtgacggcataaaacgccggggcattgttagcaaatacggcaaccacaccgccttcagcttttgccagaacggtttggtgatcgtgtaccagggcgtcaataccaacgacgtccggggtcaaaactctggaagacatactgtttctcaaatatggaacgatgaacgagaagggagataacttttatagtaacacacggaggagaggaggctgtctctcatccgtgtgctttaagcgaggcaattttatacgcgagggcgcttgcggtacaaccataatccaggaatggaaagaccgatggataacgcaccaacaatcgatgaagctgtaagaaagttggttaacagggtaatcatcaacggttcgctgtaacctaactggctgatttttaccgccgaaatcattgcggtataagccgatatgcccgggaacatagggataacggccgccacggtaaacactttcggatgcgccagataccagcgcgaccattgaataccaatggtgccgaccagcatggaggccataaaggttgaccactcaatattcagcccgctggtcattaagatcattcgtgaaccatgaccaatcgcgccaagcagcgcacaccagcgtaatgcccgaacgggaacgttgaacaccatcgcaaagccgaccgctggaatggcggcgaggatcatatcctgcgccaatgcaaacagaaactcgatcacacccatccgcgtagcccccaaatcgtcagtgccatcaccacgccgacgcaggtagccagtgtcagcagactggcgatcgcccagcgtgccagtccggtattgatgtggcctttaaacatatcggcgacggcattaatcaacggaaatcccggcaccagcagcagaacgctggcggccatcgcgatagtgggtgtattgctgaaagtgggaagttgcaaaagcaatccggaaatggtggtggcggcgaaagcggtgaggcaaaagttgatctgcggatgaagatgacgttgtgccagcagctggcggatatacatcgcggccgtactggcaaagaaggtgatgacggcaccatcccagccacctttattgagtttgcagaaacaggcgcaagaaaggccaaccattaaggctaccagccatcttgggtaacgtaatggctgaatttggctaaatcgtttctctacgcctttgtaatccagcagatggtgctccgccagaatcacaatgtgctggacttcagtcaccacatgcatattaatgccgcgatcgtgatttttacgtgtcgatgtcaggcattgcccatctttaatggttgtcagcactatggcgttcgaagagatagaactttcgacgctgtccatccccaacgcccgacccagtcgtgaggaaagctcatcaaccaacgcgctttccgcaccatgttgcaaaagaaataatccacactggatacaaagccgtgttacggctcgctgttgctcagtttgcataactcgccctttgtcatagacgtgctgcgtattgttcagataatgagaatccatttgtatcatgaagcacggttgttttgcggtaggttaagatcaaaattgcgctgattaatcctggttatcgggacaagctcggtgataaaaagcgaattatctctcgccgcaaacaaactatcacatgaatattatcactataatgaatttattgtttggcctttacgaatcaggataatagataaccgggcacgttttttaatgttaacaagttaaaaccatcagatttcattgaataaatattggttgtgtgatttttcattctgcgggaagggatatcatttaattataaattaaatgaatgtgatttctgtttttcattaagtattcctaacaacttaatgtagatattttaaatgtctccaggctatttcaccaggttatcatttgatgctaaccttctgacacatgcagtggagttgttgtgcagcaggagtatgctgatatgaaagtgaatgctaaggataatttattcgcttaatctattaatttgctggaaacatttaaggaatgaatatcctgaataaaccatcatgatttttagacagtggatgtggaggaaatatgttgccaggatgctgcaaaaatggaattgttatcagtaaaatacctgttatgcaagcagggttaaaagaggtcggtgatgctgccaacttactgatttagtgtatgatggtgtttttgaggtgctccagtggcttctgtttctatcagctgtccctcctgttcagctactgacggggtggtgcgtaacggcaaaagcactgccggacatcagcgctatctctgctctcactgccgtaaaacatggcaactgcagttcacttacaccgcttctcaacccggtacgcaccagaaaatcattgatatggccatgaatggcgttggatgccgggcaactgcacgcattatgggcgttggcctcaacacgattttacgtcacttaaaaaactcaggccgcagtcggtaacctcgcgcatacagccgggcagtgacgtcatcgtctgcgcggaaatggacgaacagtggggctatgtcggggctaaatcgcgccagcgctggctgttttacgcgtatgacagtctccggaagacggttgttgcgcacgtattcggtgaacgcactatggcgacgctggggcgtcttatgagcctgctgtcaccctttgacgtggtgatatggatgacggatggctggccgctgtatgaatcccgcctgaagggaaagctgcacgtaatcagcaagcgatatacgcagcgaattgagcggcataacctgaatctgaggcagcacctggcacggctgggacggaagtcgctgtcgttctcaaaatcggtggagctgcatgacaaagtcatcgggcattatctgaacataaaacactatcaataagttggagtcattaccaaagaggtcatgaggactcacttccctgaatatgaaataatatccagcgcctctgcggaggaccttacattattacaattacgtcgttccggattagtcattgctgatttagccggtgaaagtgaagatccacgttctgtttgtgaacattattattctttaatctcacaatatcgggaaattcactgggttttcatggtgtcacgctcctggtattcccaggcagtagaattgctcatgtgccctacggcgacgttattgtctgatgttgaacccattgagaatctggtcaagaccgtacgttccggcaatacgcacgcagagcgtatcagcgccatgctgacctctccggcaatgaatgaaactcatgattttagctatcgctccgtcattctcactctttcagagcgcaaggtactgcggctattaggtaaaggatggggcatcaaccagatagcttcgttgcttaagaaaagtaataaaactatcagcgcccaaaaaaacagtgcgatgcgtcgactggcaattcacagcaacgctgaaatgtatgcatggataaatagcgcgcagggtgcaagagaacttaacttgccttctgtttatggagatgccgcagaatggaacacagccgaattaagaagagaaatgtcgcactcatagaaaaatgcgtcatgagcagtatcggtattgagagtttattcagaaagtttgcgggtaacccttataagctccatacctataccagtcaggagtcatttcaggatgccatgtcgcggatctcatttgcggcggtcattttttctttttctgccatgagaagtgagcgcagagagggattatcttgcctgactgaactggcgattaagtttccgcgtacccggcgtttagttattgcggatgatgatattgaagctcggctgattggttcattgtcgccatcaccgctggacggtgtattaagtaaagcgtcaacgctggagatttttcatcaggaactctttttgtcattaaatggtgtacgtcaggcgaccgaccgactgaacaatcagtggtacattaaccaaagccggacgctaagcccgacggagagagaaatattgcgctttatgtcgcgtggctactcaatgacacaaattgccgagcagcttaaacgcaatatcaaaacgatccgtgcacataaatttaatgtgatgtcgaaactgggcgtcagttctgatgcagggttgttggaggccgcagatattctgttatgtatgcggcattgcgaagcaagtaatgtgttgcatccctattaatccgcatgatgccgggtttacttccccggcagtgctttcatttcagcgtacaatcgccacattgctgcacatccggtaagcgataacgctggcagcaggttcggcgcaccagcaggccatcgcgcagcacgacggtacgccagagtggattatcttcaccgttcgtgagcgttttctcaaaaaagagggcatggcgcagcgattcaaccgtcgcctcgccgagcagttgcttcatctcagtgagataccagttgatcaaataaccggtattactccagataagtttgccgttgatctctccggtcgcttctagtgcctgcacaaccggaaccagcgcctggctgattaacgtttccattcgctgctgcggcgaatgtggtgttgcgtttttatcttcacacacatcgacccagaaacaggcgacgcgtccggtttcgtgaaactcagcatggaaatgttccggcgacacatctaatgccttttcctgcgtcagtagcgccagcattaatggtggcaccatcaggccgatatacaattgtgcccatagtgagatcagcggtttgttctcgcggatcatcgttggttggttgcgatagatatgatcggaatagaccgcgagtagagaacttagcgcattcggtgatgaccattgcgccagcgtcatggcgttaagcggagcgggttcatccaggcggataaactcgagcaaatgttcacgatgtttggcgatcgtcgcacgtacggcttgtgcaagcccagcatcctgcggctggagatgcgttcgccagatgatatcttcatagagcggtgcggaacgataggccataatcgggatagtaatctaaatgataatgattgctaatcctagcgataggtttacccgatagcaagggatttctctggcttgcaaatgataaaaattatcatatgatattggttatcattatcaatgaaagagatgaaaccatgttgcaacgtacgctgggcagtggctggggagtgttgctgccgggattgctgattgcagggctgatgtatgcggatttatcgccggatcagtggcggattgtcattctgatgggattagtattgacgccggtgatgctgtatcacaaacagttacggcattacgttttgctaccatcgtgcctggcgcttattgctgccatcatgctgatgataatgaatttgaatcagggatgaaaaatcaaggaagaaacaagaaaggaagtaaagataattggtgcgaggggggggacttgaacccccacgtccgtaaggacactaacacctgaagctagcgcgtctaccaattccgccaccttcgcacagtcatcttactttttttgatatcgcctcgtttggtgcgaggggggagacttgaacccccacgtccgtaagaacactaacacctgaagctagcgcgtctaccaattccgccaccttcgcccagtgcgagcaatatcaacgtggtttttggtgcgaggggggggacttgaacccccacgtccgtaaggacactaacacctgaagctagcgcgtctaccaattccgccaccttcgcataccatcaattcttaaaaagaattgctaccacggaggcgcattctagtggttttcagcttttcgtcaatagttaattatcgccggaggtgtaattgctggaaaaatgtccatcaggaaactagcgtgcaggtttggtaggcatgcgggggcagatgccagatgcgacgctggcgcgtcttatctggcctacgaagggctaacgtgcaggttttgtaggtcggataaggcgttcacgccgcatccgacacggtattcggcgagataattaacctttcttcgcctggcgggtcataatggcgcgatacaccttgaaacgcccggtttgcgcaatcacttcatggaagccaaatgtctcatccagcacgtccgggtaaggcaggaaggcgttcgctacaattcgcagctcgccgccgctattaagatgacgcaccgcgccgcgaatcagcgtttgcgccgcatccaggctggtttgcatcccatcgtggaacggcgggttggagatgatcatatcaaaacgacctttcacctcggaaaagacgttgctggcaaagacttcaccttcaacacagttggccgcaagtgttgcgcggctggcttctaccgctggcgcagagacatcgcacaaggtgagacgaattttcggcgaatggcgcgcaaaggcaactgaaagcacccccgcgccacagccgacatccagcactttacctttcgtgtgcggagttaacgtcgagagcagcaactggctaccgacatccagaccgtcgcggctaaacacgccaggcagcgttttgaccgtcaggccatcgacgctgtattcgccccagaatttatcggcatcaaataccggctgtttttccagacgaccaaaatagaggccacagcgacgagcgctgtcgactttattcaacggcgcataatctgccagcatctgctcggcgctgcgcacgccgctgcggttctcgccaacgacaaaaatatctgtccccactggcagcagagaaagtaaattcatcaactggaactgggcttccggtttgttcttcggccagtagtaaatcagcgtatcgcaatctgcgacgtcatccaccgtggcgaccagactgaaacgggcgttatcccccatctggcggcttaatacctgccagtggtggaattgctgggtatgagcacggctggccgcggtatctaaacgcgcgggcaggtcatcctgtaagtctccggcaaacagaatacggctttgttcgaaatcatcactgtgacgcagcaagacttcacttgccggggtaaatgcagacatggaatgctcctcaattgatactggcggcgattatagccatatgttggcgcggtatcgacgaatttgctatatttgcgcccctgacaacaggagcgattcgctatgacatcccgacgagactggcagttacagcaactgggcattacccagtggtcgctgcgtcgccctggcgcgttgcagggggagattgccattgcgatcccggcacacgtccgtctggtgatggtggcaaacgatcttcccgccctgaccgatcctttagtgagcgatgttctgcgcgcattaaccgtcagccccgatcaagtgctgcaactgacgccagaaaaaatcgcgatgctgccgcaaggcagtcgctgcaacagctggcggttgggtactgacgaaccgctatcactggaaggcgctcaggtggcatcaccggcgctcaccgaattacgggcaaacccaacggcacgcgccgcgttatggcaacagatttgcacatatgaacacgatttcttccctcgaaacgactgatttaccagcggcttaccacattgaacaacgcgcccacgcctttccgtggagtgaaaaaacctttgccagcaaccagggcgagcgttatctcaactttcagttaacgcaaaacggcaaaatggcggcgtttgcgattacgcaagtggtgctggatgaagctacattgttcaatattgcggtcgatcctgactatcagcgtcagggattgggaagggtgctgctggaacatctgatcgacgaactggaaaaacgcggcgtggcgacactatggctggaagtccgtgcctcaaatgctgccgccattgccctgtacgaaagtttaggctttaacgaggcgacgattcgccgcaattactaccccaccacggacggtcgcgaagacgccatcatcatggcgttgccaatcagtatgtaagacaaggtggaataatgaagtgggactggattttctttgatgccgatgaaacgctgtttacctttgactcattcaccggcctgcagcggatgtttcttgattacagcgtcacctttaccgctgaagattttcaggactatcaggccgttaacaagccactgtgggtggattatcaaaacggcgcgatcacttcattacagcttcagcacgggcgttttgagagctgggccgaacggctgaaagttgaagcaggcttgcttaacgatgcctttattaatgcgatggcggaaatctgcacgccgctgccgggcgcggtttctctgcttaacgccattcgtggcaacgccaaaatcggcatcatcaccaacggctttagcgccttgcagcaagtgcgtctggaacgcacgggcctgcgtgattacttcgatttgctggtgatttccgaagaagttggcgttgccaaaccgaataagaaaattttcgattatgcgctggaacaggcgggcaatcctgaccgttcacgcgtgctgatggttggcgacactgccgagtccgatattctcggtggcatcaacgccgggcttgcgacctgctggctgaatgcgcacaatcgcgagcaaccagaaggcatcgcgcccacctggaccgtttcttcgttgcacgaactggagcagctcctgtgtaaacactgattgcctcccccccgttgatgggtaaaatagccgcaatttttcgttttcaacaagcgcggcgcgatgccgcttactcaagaagaaagaattatgacgttgtctccttatttgcaagaggtggcgaagcgccgcacttttgccattatttctcacccggatgccggtaagactaccatcaccgagaaggtgctgctgttcggacaggccattcagaccgccggtacagtaaaaggccgtggttccaaccagcacgctaagtcggactggatggagatggaaaagcagcgtgggatctccattactacgtctgtgatgcagtttccgtatcacgattgcctggttaacctgctcgacaccccggggcacgaagacttctcggaagatacctatcgtaccctgacggcggtggactgctgcctgatggttatcgacgctgcaaaaggtgttgaagatcgtacccgtaagctgatggaagttacccgtctgcgcgacacgccgatcctcacctttatgaacaaacttgaccgtgatatccgcgacccgatggaactgctcgatgaagttgagaacgagctgaaaatcggctgcgcaccgatcacctggccgattggctgcggcaagctgtttaaaggcgtttaccacctttataaagacgaaacctatctctatcagagcggtaaaggccacacgattcaggaagtccgtattgttaaagggctgaataacccggatctcgacgctgcggttggtgaagatctggcacagcagctacgtgacgaactggaactggtgaaaggcgcgtctaacgagttcgacaaagaattgttccttgcgggcgaaatcactccggtattcttcggtactgcgctgggtaacttcggcgttgatcatatgctggatggcctggtggagtgggctcctgcgccgatgccgcgtcagactgatacccgtaccgtagaggcgagcgaagacaaatttaccggcttcgtatttaaaattcaggccaacatggacccgaaacaccgcgaccgcgtggcgtttatgcgcgtagtatccggtaaatatgaaaaaggcatgaagctgcgccaggtgcgtactgcgaaagatgtggttatctccgacgcgctgacctttatggcgggcgaccgttcgcacgttgaagaagcgtatccgggcgatatcctcggcctgcacaaccacggcactattcagatcggcgacacctttacccagggtgagatgatgaagttcaccggtattccgaacttcgcaccagaactgttccgtcgtatccgcctgaaagatccgctgaagcaaaaacagctgctcaaagggctggtacagctttccgaagagggcgcggtgcaggtgttccgtccgatctccaacaacgatttgatcgttggtgctgttggtgtgctgcagtttgatgtggtggtatcgcgcctgaagagcgaatacagcgttgaagcagtatatgaatcagtcaacgttgccactgcccgctgggtagaatgtgcggacgcgaagaaattcgaagagttcaagcgtaagaacgaaagccaactggcgcttgatggcggcgataacctcgcttacatcgctaccagcatggtcaacctgcgcctggcgcaggaacgttatcccgacgttcagttccaccagacccgcgagcattaattcttgcctccagggcgcggtagccgctgcgccctgtcaatttcccttccttattagccgcttacggaatgttcttaaaacattcacttttgcttatgttttcgctgatatcccgagcggtttcaaaattgtgatctatatttaacaaagtaatgacatttctgacggcgttaaataccgttcaatgcgtagatatcagtatctaaagccgtcgattgtcattctaccgatattaataactgattcagaggctgtaatggtcgttattcatcacccatcgcttttgtgatggcgaccattgacttctgtagagggtgaagtctctccctattcagcaatgcaacctcgtgttgccaggctcaaattacgagcaaacatacaggaataaatcgatgactatgacaagactgaagatttcgaaaactctgctggctgtaatgttgacctctgccgtcgcgaccggctctgcctacgcggaaaacaacgcacagactaccaatgaaagcgcagggcaaaaagtcgatagctctatgaataaagtcggtaatttcatggatgacagcgccatcaccgcgaaagtgaaggcggcgctggtggatcatgacaacatcaagagcaccgatatctctgtcaaaaccgatcaaaaagtcgtgaccctgagcggtttcgttgaaagccaggctcaggccgaagaggcagtgaaagtggcgaaaggcgttgaaggggtgacctctgtcagcgacaaactgcacgttcgcgacgctaaagaaggctctgtgaagggctacgcgggtgacaccgccaccaccagtgaaatcaaagccaaactgctggcggacgatatcgtcccttcccgtcatgtgaaagttgaaaccaccgacggcgtggttcagctctccggtaccgtcgattcccaggcacagagcgaccgtgctgaaagtatcgccaaagcggtagatggtgtgaaaagcgttaaaaatgatctgaaaactaagtaattcgtcgtaattcgtcctcccgaactttgtcgggaggcgcgatgtgcaccacactaaaaatatcgcattgagtgattttcacgctcatatcaagcggtgacattaactatggtaaaggagacgcttatgtttcgttggggcatcatatttctggttatcgcgttaatcgccgccgcacttgggtttggtggtctggccggtaccgctgcaggcgcagctaaaattgtctttgtcgtcgggattattctgttcctggtgagtttgttcatgggccgaaaacgaccctagatttcagaccattaagaaaattttatccaaagccagtccagcggactggcttttgcggttttagcgaataataaattgcgttactttgtcattctttcacaacaaaaacaggaaggcagaggtggggcagcgaatacctgtaacgcttggtaatattgcgccgttgtcgctaaggccgttccagcctggacgaatagctctggtgtgcgaaggcggcggacagcgtggaattttcacggctggcgtgctggatgagtttatgcgcgcgcagtttaatcctttcgatctttatctcggcacatctgccggggcgcagaacctctcggcgtttatctgcaatcagcccggttacgcgcgcaaagtcatcatgcgctataccacaaaacgcgaatttttcgatccattgcgctttgtccgtggaggaaatcttatcgatctcgactggctggtggaggccaccgcaagccagatgccgttgcaaatggataccgccgcgcggttgtttgacagcggcaaatcgttttatatgtgcgcctgtcgtcaggatgactacgcgcctaattactttttaccaaccaaacaaaactggctggatgtgattcgcgcctccagtgcgatacctggcttttatcgtagcggagtgtcgctggaaggcattaactacctggatggcgggatcagtgatgcgattccggttaaagaggcggcaaggcagggcgctaaaacgttggtcgtcattcgcactgtgccgtcacaaatgtactacacgccgcagtggttcaaacgcatggaacgctggctgggtgacagtagcctgcagccgctggtcaatctggtgcagcatcatgaaaccagctatcgtgacattcagcaatttattgagaaaccaccgggcaagctgcggatattcgaaatttatccgccgaagccattacatagtatcgcgcttggcagtcggattccggcgctgcgtgaagactataaacttgggcgtttatgcggtcgttatttcctcgccacggttggcaagctattaactgaaaaagcgccgcttacccgccatctggtgccagtggtgacgccggaatcgatcgttattccgcctgcgccagtcgccaacgatacgctggttgccgaagtgagcgatgctccgcaggcgaacgacccgacatttaacaatgaggatctggcttgatttgccgttttatcgatacccactgccattttgatttcccgccgtttagtggcgatgaagaggccagcctgcaacgcgcggcacaagcgggcgtaggcaagatcattgttccggcgacagaggcggaaaattttgcccgcgtgcaggcgttagcggaaaaatatcaaccgctgtatgccgcattggggttgcatccggggatgttggaaaaacatagcgatgtgtctcttgatcagctacagcaggcgctggaaaggcgtccggcgaaggtggtggcggtgggggagatcggtctggatctcttcggcgacgatccgcaatttgagaggcagcagtggttactcgacgaacagctgaaactggcgaaacgctacgatctgccggtgatccttcattcccggcgtatacacgacaaactggcgatgcatcttaaacgtcacgatttaccgtgcactggcgtggttcacggtttttccggcagcctgcaacaggccgagcggtttgtacagctgggctacaaaatcggcgtaggcggtactatcacctatccacgcgccagtaaaacccgcgatgtcatcgcaaaattaccgctggcatcgttgttgctggaaaccgacgcgccggatatgccgctcaacggctttcaggggcagcctaaccgaccggaacaggctgtgcgggtgtttgacgtgctttgcgagttgcgcccggaaccagaagatgagattgccgaagtgttgcttaataatacgtatgcgttgtttagcgttagtgggtagcctacccttcgtaggcagcatccggcagtcggcgcataatgcctgatgcgacgcttaacgcgtcttatcatgcctacaggtttgtgccgaaccgtaggccggataaggcgttcacgccgcatccggcagttggcgcacaatgcctgatgcgacgcttgacgcgtcttatcatgcctacaggtttgtgccgaaccgtaggccggataaggcgttcacgccgcatccggcagttggcgcacaatgcctgatgcgacgcttgacgcgtcttatcatgcctacaagtctgtgccgaaccgtaggccggataaggcgttcacgccgcatccggcagttggcgcacaatgcctgatgcgacgctgacgcgtcttatcatgcctacaagtctgtgccgaaccgtaggccggataaggcgttcacgccgcatccggcagtcggcgcataatgcctgatgcgacgcttgtcgcgtcttatcatgcctacaagtctgtgccgaaccgtaggccgtatccggcatgtcacaaatagagcgccggaaatatcaaccggctcaccccgcgcacctttaacgcatcagccaacggctcaacgtcttccggcgtggcgctcgcccagctttgcgcctcgccatacacgccgtgggcatgaaacgcattcaggcgaaccggaacatcgccaagtctcttgataaacgtcgccagctcatcgatgtgatgcaaataatccacctggtctggaattaccagcaaacgcagttccgccagcttgccgcgctctgcaagcaaacagatgctgcgcttaatctgctgattatcgcgtccggttaagtgttgatgacattcgctcccccacgctttgagatcgagcattgcgccgtcacacaccgggagtaatttttcccagccggtttcgctcaacatgccgttactgtccaccaggcaggtgaggtggcgcagttgcggatcgtttttgatagcagtaaacagcgccactacaaacggcagttgggtcgtggcttcgccgccgcttaccgttatcccttcaataaacagcaccgctttgcggacatggctaagcacttcgtccacgctcatggattgcgccattggcgtggcatgttgcggacacctcttcaggcaggtatcacactgctcgcaaaccacagcgttccacaccactttgccgtcaacaatctgcaacgcctgatgcggacactgtggcacgcactccccacagtcattgcaacgtcccatcgtccacggattgtgacagtttttgcagcgcagattgcagccctgcaaaaacagagccagacgactgcctggcccgtcaacgcaggagaaggggataatcttactgactaaagcgcatctgctgttcatggcttatcacgcgcggctggcgttccagaatacgagtgttgcgtgcggcttcttcgcccagccaggtggtgttggtgcgtgaaccttcggcgcgatatttttctaaatccgacaaacgcaccatataaccggtaacgcgaaccagatcgttaccgctgacattggcagtaaattcacgcattccggctttaaaggcaccgaggcaaagctgtaccagcgcctgcggattacgtttgatggtttcgtcgagcgtcagaatgtcgctgatgccggaataataataagcatgatgcggggcgacagtttgcagatgggtgatcggatctggctcatcaccatacggcaaacgcgcgcccggcgtggtgccgatatcggaactgatccccgactgtgcgtgtaacatggcgcgtttttgccagccatatttcacgggggtattggcgacaaactccgccagttgcgcgctgatgcgataacccacttcatttgcggcggcttctttaccgtagcgcgcggcaatcccttctttcttacacagcaagttaaccgcttccgccagcccatacatgccaaacattggcacaaaacgttcagggttaatcagcccttctttcaccaggaagctattctcaaagaagtgtgattgttgatagaggaattcacaccgcgcatcgatgatggcgatctgctgctggcagtagtgcggtagagtgcgcgtaaagaagtcatccagcgattcgctgcgctcggcaatggctttcaggttaaggcgtaccagcgtgctgccaccacccgccagcggcagtgagttgtaacagctcacaatcccgtagcccccttttgtgaaaattttatcatgcaccggaccgttggcgatgtgcggtttgctacattcacagatgttcttcgccacttccagcagcaggtcatcaggggtgatttcaggatcgtagataaaggtcaggttcggtgaaacctgcttcaactctgcgtctgcacgtaagatcgcgcgggtaatgggcgaatcagacgggccgatattggcgtgcataaaggcgtctggcagggttctgtcgaggtaacgccagaaacgttttattcgaacatcgatctcgtcttgtgttagaattctaacatatggttgcaacaacgcatccagttgccccaggtagaccggcatcgatgtgaccgacggtacgtggtggtaaagaatggtcagcagagagagtgcgtcatcaagatctttcgcgccttccagctccagccattcggaaccgttcgccagaaaacgggcgtaatcgggtaagacatagcgcggtttgtacggcgcatgaccttcaaacatatcgcagattacaccctcatccagcgcgcggcgggcttcggcaggaagctgcggataaggcagattgttttctgcttccagtgccagaaaatggcgcttctgctccgggctaagcactgggctggtgacaatttgctggcaacgttgttgcagtgcattttcatgagaagtgggcatcttcttttccttttatgccgaaggtgatgcgccattgtaagaagtttcgtgatgttcactttgatcctgatgcgtttgccaccactgacgcattcatttgaaagtgaattatttgaaccagatcgcattacagtgatgcaaacttgtaagtagatttccttaattgtgatgtatatcgaagtgtgttgcggagtagatgttagaatactaacaaactcgcaaggtgaattttattggcgacaagccaggagaatgaaatgactgatctgaaagcaagcagcctgcgtgcactgaaattgatggacctgaccaccctgaatgacgacgacaccgacgagaaagtaattgctctgtgtcatcaggccaaaaccccggtcggcaataccgccgctatctgtatctatcctcgctttatcccgattgctcgcaaaacgctgaaagagcagggcaccccggaaatccgaatcgctacggtaaccaacttcccacacggtaacgatgacatcgaaatcgcgctggcagaaacccgtgcggcaatcgcctacggtgctgatgaagttgacgttgtgttcccgtaccgcgcgctgatggcgggtaacgagcaggttggttttgacctggtgaaagcctgtaaagaggcttgcgcggcagcgaatgtactgctgaaagtgatcatcgaaaccggcgaactgaaagacgaagcgctgatccgtaaagcgtctgaaatctccatcaaagcgggtgcggacttcatcaaaacctctaccggtaaagtggctgtgaacgcgacgccggaaagcgcgcgcatcatgatggaagtgatccgtgatatgggcgtagaaaaaaccgttggtttcaaaccagcgggcggcgtgcgtactgcggaagatgcgcagaaatatctcgccatcgcagatgaactgttcggtgctgactgggcagatgcgcgtcactaccgctttggtgcttccagcctgctggcaagcctgttgaaagcgctgggccacggtgacggtaagagcgccagcagctactaagtaagatgctttacgcctgatgcgctgcgcttatcaggcctacgagacgtatctacccgtaggccggataaggcgtagacgcatccggcaaaagccgcctcatactcttttcctcgggaggttaccttgtttctcgcacaagaaattattcgtaaaaaacgtgatggtcatgcactgagcgatgaagaaattcgtttctttatcaacggcattcgcgacaacactatctccgaagggcagattgccgccctcgcgatgaccattttcttccacgatatgacaatgcctgagcgtgtctcgctgaccatggcgatgcgagattcaggaaccgttctcgactggaaaagcctgcatctgaatggcccgattgttgataaacattccactggtggcgtcggcgatgtgacttcgctgatgttggggccgatggtcgcagcctgcggcggctatattccgatgatctctggtcgcggcctcggtcatactggcggtacgctcgacaaactggaatccatccctggcttcgacattttcccggatgacaaccgtttccgcgaaattattaaagacgtcggcgtggcgattatcggtcagaccagctcactggctccggcggataaacgtttctacgcgacccgtgatattaccgcaaccgtggactccatcccgctgatcaccgcctctattctggcgaagaaacttgcggaaggtctggacgcgctggtgatggacgtgaaagtgggtagcggcgcgtttatgccgacctacgaactctctgaagcccttgccgaagcgattgttggcgtggctaacggcgctggcgtgcgcaccaccgcgctgctcaccgacatgaatcaggtactggcctccagtgcaggtaacgcggttgaagttcgtgaagcggtgcagttcctgacgggtgagtatcgtaacccgcgtctgtttgatgtcacgatggcgctgtgcgtggagatgcttatctccggcaaactggcgaaagatgacgccgaagcgcgcgcgaaattgcaagcagtgctggacaacggtaaagcagcagaagtctttggtcgtatggtagcggcacaaaaaggcccaaccgacttcgttgagaactacgcgaagtatctgccgacagcgatgctgacgaaagcagtctatgctgataccgaaggttttgtcagtgaaatggatacccgcgcgctggggatggcagtggttgcaatgggcggcggtcgtcgtcaggcatctgacaccattgattacagcgtcggctttactgatatggcgcgtttgggcgaccaggtagacggtcagcgtccgctggcggttatccacgcgaaagacgaaaacagctggcaggaagcggcgaaagcggtgaaagcggcaattaaacttgccgataaagcaccggaaagcacaccaactgtctatcgccgtatcagcgaataacggtatactgatctgatcatttaaatttgaagcactgagtacggagaacatatgaaacgtgcatttattatggtgctggactcattcggcatcggcgctacagaagatgcagaacgctttggtgacgtcggggctgacaccctgggtcatatcgcagaagcttgtgccaaaggcgaagctgataacggtcgtaaaggtccgctcaatctgccaaatctgacccgtctggggctggcgaaagcacacgaaggttctaccggtttcattccggcgggaatggacggcaacgctgaagttatcggcgcgtacgcatgggcgcacgaaatgtcatccggtaaagataccccgtctggtcactgggaaatcgccggtgtcccggttctatttgagtggggatatttctccgatcacgaaaacagcttcccgcaagagctgctggataaactggttgaacgcgctaatctgccgggttacctcggtaactgccactcttccggtacggtcattctggatcagctgggcgaagagcacatgaaaaccggcaagccgattttctatacctccgctgactctgtgttccagattgcctgccacgaagaaacctttggcctggataaactctacgaactgtgcgaaatcgcccgtgaagagctgaccaacggcggctacaacatcggtcgtgttatcgctcgtccgtttatcggtgacaaagccggtaacttccagcgtaccggtaaccgtcacgacctggctgttgagccgccagcaccgaccgtgctgcagaaactggttgatgaaaaacacggtcaggtggtttctgtcggtaaaattgcagacatctacgccaactgcggtatcaccaagaaagtgaaagcaactggcctggacgcgctgtttgacgccaccatcaaagagatgaaagaagcgggtgataacaccatcgtcttcaccaacttcgttgacttcgactcttcctggggccaccgtcgcgacgtcgccggttatgctgtgggtctggagctgttcgaccgccgtctgccggagctgatgtctctgctgcgcgatgacgacatcctgatcctcactgctgaccacggttgtgatccgacctggaccggtactgaccacacgcgtgaacacattccggtactggtttacggcccgaaagtaaaaccgggctcactgggtcaccgtgaaaccttcgcggatatcggccagactctggcaaaatattttggtacttctgatatggaatatggcaaagccatgttctgataatgggtgcggcttgatgccctcaccccggccctctccctcagggagagggtgaaaacatgttgataaggataaaacaatggctaccccacacattaatgcagaaatgggcgatttcgctgacgtagttttgatgccaggcgacccgctgcgtgcgaagtatattgctgaaactttccttgaagatgcccgtgaagtgaacaacgttcgcggtatgctgggcttcaccggtacttacaaaggccgcaaaatttccgtaatgggtcacggtatgggtatcccgtcctgctccatctacaccaaagaactgatcaccgatttcggcgtgaagaaaattatccgcgtgggttcctgtggcgcagttctgccgcacgtaaaactgcgcgacgtcgttatcggtatgggtgcctgcaccgattccaaagttaaccgcatccgttttaaagatcatgactttgccgctatcgctgactttgacatggtgcgtaacgcggtagacgcggctaaagcactgggcattgatgctcgcgttggtaacctgttctccgctgacctgttctactctccggacggcgaaatgttcgacgtgatggaaaaatacggcatcctcggcgtggaaatggaagcggctggtatctacggcgtcgctgcagaatttggcgcgaaagccctgaccatctgcactgtgtctgaccacatccgcactcacgagcagaccactgccgctgagcgtcagaccaccttcaacgacatgatcaaaatcgcactggaatccgttctgctgggcgataaagagtaattgtgtttcgctgaaaggcgattgtcgtgttaagccggagtgggggactgctccggctttttagtatctattcatcaatagcaactgatttatagatttactattatttttcatatggataaaaaataaaatacattcaagtatctattcacgaatctattcatttatgttcagccgtcatccaggaagggcatatcagcaactctggtggacaaccataaatttctcccattttgcttttgatgtttgagctaagccgttccgtcttttcgatctattttagagaattaatcgagatacctaacattttacttacttcagcaagcgataatttatgcctgatacgcacggcggctagccaggaaatacgctggcttaacattaaattgataatctcccgctcctggttttccagatcgatcatattcccttcctttggtattttaatcagcgagttaccttaccgcccccgctatccacgtcgacaactcccgtagctctttttcctggtccgggaagtcaaccaacagcgcttcgcactcttgttgcagcatatccgcgcggtacaggcagccttgcagtcgcccggcgagggcttccagcggcgcggggttgaggctgtcggtaaacacctgggcgcgggtgatatggcctttttcaacgtcgaaatgcagttccacgccgccccagctaaagcgttcatccagcagatgcgagaatgccggagcctgaccgaagttccattcccagctactctgacgggcaaaggtttcggcgaagtttggcaagtctggcgttttgtccggggagatgatttccgcttctacacgctcgccataatgggcgaaaaaggccttggttatggcctcgcaaacctgctcatgggtgatccccggcagcagctcggtgaggttggtcacgcgggaacgcactgaggtaatgcctttcgccgccagtttctttttatccggattgagatagtttgccaggcggctaaggtcggcattgagcagcaaagtgccgtggtggaagccacgatctttggtttcgcgataggccgagcctgagactttgcggtcgccttcgactgttttcaccaccagatcgttacgtccggacgcttcggcgctgacgccgagcgcgttcagcgcattgagcacaatcgacgtagagatggttttatcgtactccggcttgccagccataaaggtaaagcaggtattgccgagatcgtggaacaccgcgccgccaccgctactgcgccgcgccaggcggacgttatcttcttccatccgccgggtattacactctttccacgggttctgcgcgcgaccaatcactaccgtgtcggcattgcgccagagaaacagaacgcgctgcgtggcgggcatttggcgaaaaatacactcttccaccgccaggttaaaccacgggtcgtaagagtcagagatgagcaggcgtaatgtggacataacgatttcctttcttgtagtaatgggtcactcttttttctcgctttcttcctcttccggcaccggtttgctggcggttaacaggaagggcgattgctgccagcgggtgcgtttaccctgtagcagcgtgcgggtcagcactacgccgattgccagtgagagcagcaacatcaggcgtaaaatgttagtggtgttatccacctgttgggcttcggtggcgagcgtatgggtgtcgagtgtcaggcgcagatagccgagcggtccgtttttacccgcaattggctcgacaatctgctggttaaaatagccgcctgcttttttaccgtcgagcgccagccggtcgcgcacttcgacgctttcgcctgaacgggcgataagatcgccttgttcgtcatacacacccgcgtcgaggatgcggctttcatccgttaactgatcgaggatcgcctgaatgcgtttttcatctggtgagtcggtacgcatcagcggtgcaacgttcagcgtcacctgacgcgccagggtgcgggccagttcttccagctgtggattacgctgtcgctggtggttttgactaaaccatgacgccccctgcatcagtgccactaacaaggcaagacagaacaggacaatcactgcccgatgcagccggaatttcagttttgtgcgagccatcttccaccctttgaaaatttgagacttaatgttgccagaagcaatggatacaaggtagcctcatgcgttattttccctgcttcgaacgattttacaggagccttaatgcctaacattacctggtgcgacctgcctgaagatgtctctttatggccgggtctgcctctttcattaagtggtgatgaagtgatgccactggattaccacgcaggtcgtagcggctggctgctgtatggtcgtgggctggataaacagcgtctgacccaataccagagcaaactgggtgcggcgatggtgattgttgccgcctggtgcgtggaagattatcaggtgattcgtctggcaggttcactcaccgcacgggctacgcgcctggcccatgaagcgcaactggatgtcgccccgctggggaaaatcccgcacctgcgcacgccgggtttgctggtgatggacatggattccaccgccatccagattgaatgtattgatgaaattgccaaactggccggaacgggcgagatggtggcggaagtaaccgaacgggcgatgcgcggcgaactcgattttaccgccagcctgcgcagccgtgtggcgacgctgaaaggcgctgacgccaatattctgcaacaggtgcgtgaaaatctgccgctgatgccaggcttaacgcaactggtgctcaagctggaaacgctgggctggaaagtggcgattgcctccggcggctttactttctttgctgaatatctgcgcgacaagctgcgcctgaccgccgtggtagccaatgaactggagatcatggacggtaaatttaccggcaatgtgatcggcgacatcgtagacgcgcagtacaaagcgaaaactttgactcgcctcgcgcaggagtatgaaatcccgctggcgcagaccgtggcgattggcgatggagctaatgacctgccgatgatcaaagcagcagggctggggattgcctaccatgccaagccaaaagtgaatgaaaaggcggaagtcaccatccgtcacgctgacctgatgggggtattctgcatcctctctggcagcctgaatcagaagtaattgctcgcccgccatcctgcgggcggcacagcattaacgaggtacaccgtggcaaaagctccaaaacgcgcctttgtttgtaatgaatgcggggccgattatccgcgctggcaggggcagtgcagtgcctgtcatgcctggaacaccatcaccgaggtgcgtcttgctgcgtcgccaacggtggcgcgtaacgagcgtctcagcggctatgccggtagcgccggggtggcaaaagtccagaaactctccgatatcagccttgaagagctgccgcgtttttccaccggatttaaagagttcgaccgcgtactaggcggcggcgtggtgccgggaagcgccattctgattggcggtaacccaggtgcggggaaatccacgctgctactgcaaacgctgtgcaaactggcccagcagatgaaaacgctgtatgtcactggcgaagagtcgctgcaacaggtggcaatgcgcgctcatcgccttggcctgccgactgacaatctcaatatgttgtcggaaaccagcatcgaacagatctgcctgattgccgaagaagagcaaccgaaactgatggtaattgactcgatccaggtgatgcatatggcggatgtacaatcatcgcctggtagcgtggcgcaggtgcgtgaaacggcggcttatctgacgcgcttcgccaaaacgcgcggtgtggcgattgtcatggttgggcacgtaaccaaagatggctcgctggctggccctaaagtgctggaacactgtatcgactgttcggtgcttctggatggtgatgccgactcccgttttcgcaccttgcgcagccataaaaaccgcttcggcgcggtgaatgagctgggcgtcttcgcgatgaccgaacaggggctgcgtgaagtcagcaacccttcggcaattttcttaagtcgcggagatgaagtgacctccggcagctccgtgatggtggtgtgggaaggaacgcgtccgttgctggtggagattcaggcgctggtcgatcactcgatgatggcgaatccgcgccgcgtggcagtggggctggaacaaaaccgtctggcaatcctgctggctgtcttgcaccgtcacggtggtctgcaaatggccgatcaggatgtatttgtgaacgtggtcggcggcgtgaaggtaaccgaaaccagtgccgatttagcgttactgctggcgatggtttccagcctgcgtgacagaccgctgccacaggatctggtggtgtttggtgaagtcgggctggcaggggagatccgcccggtgcccagcggtcaggaacgaatttcagaagcggcgaaacacggttttcgccgggcgattgttccggcggctaacgtaccgaaaaaagcgccggaagggatgcagatttttggcgttaaaaaactctccgacgcgcttagcgtgttcgacgacttataatgagagatacggagggagatatgtcgtcatttgattacctgaaaactgccatcaagcaacagggctgcacgctacagcaggtagctgatgccagcggtatgaccaaagggtatttaagccagttactgaatgccaaaattaaaagccccagcgcgcaaaagctggaggcgttgcaccgttttttggggcttgaatttccccgacagaagaaaaccattggtgtcgtattcggtaagttctacccgctgcataccggacatatctaccttatccagcgcgcctgtagccaggttgacgagctgcatatcattatgggttttgacgatacccgcgaccgcgcgttgtttgaagacagcgccatgtcgcagcagcccacggtgccggatcgtctgcgctggttattacaaacttttaaatatcagaaaaatattcgcattcatgctttcaacgaagagggcatggagccgtatccgcacggctgggatgtgtggagcaacggcatcaaaaagtttatggctgaaaaggggattcagccggacctgatctacacctcggaagaagccgatgcgccacagtatatggaacatctggggatcgatacggtgctggtcgatccgaaacgtacctttatgagtatcagcggtgcgcagatccgcgaaaacccgttccgctactgggaatatattcctacggaagtgaagccgttctttgtacgtaccgtggcgatccttggtggcgagtcgagcggtaaatccaccctggtaaacaaacttgccaatatcttcaataccaccagtgcgtgggaatatggtcgcgattatgtcttttcacacctcggcggtgatgagatcgcattgcagtattccgattacgataaaatcgcgctgggccacgcacaatacattgattttgcagtgaaatatgccaataaagtggcgtttattgacactgattttgtcactacccaggcgttctgcaaaaagtacgaagggcgtgagcatccgttcgtacaggcgttgattgatgaataccgtttcgatctggtgatcctgctggagaacaacacgccgtgggtggcggatggtttacgcagcctcggcagttcggtggatcgcaaagagttccagaacttgctggtggagatgctggaagagaacaatatcgaattcgtgcgggttgaagaggacgattatgacagccgtttcctgcgctgcgtggagctggtgcgggagatgatgggggagcagagataaccgcgatgaaacggctcaaaggcgaggtataaaataagttttttgatgagttgaaaacctctctggaagaggctgtcgagattaaacaaggtttgaaaaaacctgcacgggtgacccgctacgaaattgcggatactaaggctgttgtaggccggaaaaggcgttcacgccgtatccggcattcggtgctcaatgcctgatgcgacgcttaccgcgtcttatcaggcctggagattcacaacgtattgaaatttcttggtttgtaggccggataaggcgttcacgccgcatccggcattttacgcattacttcgcaatacgcttgtacttgatacgcttcggctccagtgcgtctgcgcccagcgtgcgtttcttgtactcttcgtactcagtaaagttaccttcgaagaactcaactttaccttcatcctggtagtccaggatgtgcgtggcgatacggtcgaggaaccaacggtcgtgcgagataaccatcgcacagcccgggaactccagcagggcgttttccagcgcgcgcagggtttcgatatccaggtcgttggttggttcgtcgagcagcagcatgttgccgccaacctgcagcagcttcgccagatgcagacgaccgcgctcaccaccggaaagttcaccaacgcgtttaccctgatcaacccctttaaagttaaagcggccaacgtaggcgcggcttggcatctcggtgttgccgatcttcataatatccagcccgccggaaacttcttcccaaacggttttgctgttatccattgagtcacggaactgatcaaccgacgccagtttcaccgtttcacctaaagtgatggtgccgctgtccggctgttcctgaccagagatcatacggaacagggtcgatttacccgcgccgttcggaccgatgatcccgacgattgcccctttcgggatcgagaagctcaggtcatcaatcagcaggcgatcaccgtaggatttacgcaggttgctgacttccagcactttatcgcccagacgcggtccaggtggaataaacagttcgttggtttcgttacgtttctgatattcggtgctgttcagctcttcaaagcgtgccagacgtgctttacctttcgactggcggcctttagttccctgacgtacccactccagctctttctcgatcgacttacgacgcgccgcttcttgtgaagcttcctgcgccaggcgctgatctttctgctccagccaggaggagtagttgccttcccacggaataccttcaccgcggtcaagttcgaggatccagcctgcaacgttatcgaggaagtaacggtcgtgggtaatcgccaccacggtgccctcgaagtcgtgcaggaagcgttccagccaggccacggattcggcatccaggtggttggtcggttcgtcgagcagcagcatgtctggtttttccagcagcaggcggcacaacgctacgcgacgacgctcaccaccggagaggttagcgattttcgcgtcccagtccggcagacgtagcgcatccgccgcacgctccagctgtacgttcaggttatgaccgtcgtgagcctgaatgatctcttccagacggccttgttcagcggccagcttgtcaaaatcggcatccggatcggcgtacagcgcatacacttcatccaggcgtttcagggcgttaaccacttcagaaaccgcttcttcaatggactcacgcacggtgtgttccgggttcagctgcggttcctgcggcaggtaaccaatcttgatgtctggctgcggacgcgcttcaccttcgatgtctttatcaatgcccgccataatgcgcagcagggtagacttacccgcgccgttcagacccaggacaccaatttttgccccagggaagaaactcagagagatgtttttcaaaatatgacgtttcggcggaacaactttgccgacacgatgcatggtataaacgaattgagccacgttggacttcgcctctatgtttatcgtgatgatgagttttcaaaggcgaagtgtagcctttttccccgcctaatcccagttggtcgatcaccttcgcagtaaaagtaaaaaagtgtccgtaacgtggcgtaaacggcaatgactggttagcataaatctattacgcggcatgacgctgcattgatgtatttacacttagaggatgcgcttgtggaaaaagccaaacaagttacctggcggctgttggctgccggtgtctgtctgctgacggtcagcagcgtggcgcgagccgactcactggatgagcagcgtagccgttacgcgcaaatcaagcaggcctgggataatcgacaaatggatgtggtcgaacaaatgatgcctggactgaaggattatccgctttatccctacctggaataccgccagatcaccgatgatctgatgaatcaaccggcggtgacggtcactaactttgttcgcgctaaccccacgcttcctcccgctcgcacgctgcaatctcgtttcgtcaatgaactggcgcggcgtgaagactggcgtggcttgttagcctttagcccggaaaagcccggaactaccgaagcgcaatgtaattactactatgcgaaatggaacaccgggcagagtgaagaagcctggcaaggggcgaaagagctgtggctaaccggcaagagccagcctaacgcctgtgacaagttatttagcgtctggcgtgcgtcaggtaaacaagatccgctggcgtatttagagcgtatccgtctggcgatgaaagcgggtaacactggcctggtaacagtgctggcagggcagatgcctgccgattaccagactatcgcctcggcaatcatttcactggcgaacaaccctaatacggtactgaccttcgcgcgtacaaccggagcgaccgattttacccgtcaaatggcagcggtggcgtttgccagtgtggcgcggcaggatgctgaaaatgcacggctgatgatcccgtcgcttgcccaggtgcagcagcttaatgaagatcagattcaggagctgcgcgatatcgtcgcctggcgtttgatgggcaacgatgtcaccgacgagcaggcgaaatggcgcgatgacgtcattatgcgctcgcaatccacgtcgttgattgaacgccgtgtgcgaatggcacttggcaccggcgatcgtcgcggcctgaatacctggctggcgcgtctgccgatggaagcaaaagagaaagatgaatggcgttactggcaggtggatttattgctggaacgcggacgtgaagctgaagcgaaagagattttgcatcaactcatgcaacagcgtggtttctacccgatggttgcagcacaacgcatcggagaagagtatgagctgaagattgataaagcgccgcagaatgttgacagcgccctgactcaggggccggagatggcgcgcgtgcgcgagttgatgtactggaatctcgataacaccgcgcgtagcgagtgggccaatctggtgaagagcaagtcaaaaacagagcaggctcaactggctcggtatgctttcaataaccaatggtgggatcttagcgttcaggcaacgatcgccgggaagctttgggatcatctggaagagcgattcccgctggcttacaacgatcttttcaaacgttacaccagtgggaaagagatcccgcaaagctatgcgatggcgattgcccgtcaggagagcgcctggaatccgaaagtgaaatcaccggtaggggccagcggcctgatgcagattatgcctggtacagcgacccatacggtgaagatgttctctattcctggttatagcagccctgggcaattgctggatccggaaacgaatatcaacattggcaccagttacctgcaatatgtttatcagcagtttggcaataaccgtattttctcctcagcagcttataacgccggacctggacgggtgcgaacctggcttggcaacagcgccgggcgtatcgacgctgtggcatttgtcgagagtattccgttctccgagacgcgcggttatgtgaagaacgtgctggcttatgacgcttactaccgttatttcatgggggataaaccgacgttgatgagcgccacggaatggggacgtcgttactgatccgcacgtttatgatatgctatcgtactctttagcgagtacaaccgggggaggcattttgcttcccccgctaacaatggcgacatattatggcccaacaatcaccctattcagcagcgatggcagaacagcgtcaccaggagtggttacgttttgtcgacctgcttaagaatgcctaccaaaacgatctccatttaccgttgttaaacctgatgctgacgccagatgagcgcgaagcgttggggactcgcgtgcgtattgtcgaagagctgttgcgtggcgaaatgagtcagcgtgagttaaaaaatgaactcggcgcgggcatcgcgacgattacgcgtggatctaacagcctgaaagccgcgcccgtggagctgcgccagtggctggaagaggtgttgctgaaaagcgattgattttgtaggcctgataagacgcggcagcgtcgcatcaggcatcgtgcaccgaatgccggatgcggcgtgaacgccttatccgtcctacaatgcctgatacacggcattgtgaaacggactcagcgccaggatcaccgcctggtgatagacgctggcgcgagtgagtttcccggcggtaaacacgccgatcgccccttccttacgaccaatctcatcaataccggtataacgcgacatcacgggaccaagcgcctcaccttcacgcactttctgcagaatcaccgcaggtaacggcaaagtagccgaacgcgcctcgccgcgctggctggtgttttcaatcaccacccaactgaaagtgctgtcaccatcgatgccagcttcaatcgccacccaaaaatcagcctctggaagtaaacggcgggcatttgctacccgatttcgtgcgccagcgcgcgtttcctcactgccaaagggctgttccggtacaccgctctcgacggcaacggatgcaatatggcaggatccttcgccgaagatctcgtgaaatgcctgcagaatggcctgaattttagcgggattggtggtcgcacagataacttggtgcataatcagcattactcagaaaattaacgttacagcagtatacggaaaaaaagcatgttacaggtatacctagtccgccacggtgaaacgcagtggaacgccgagcgacgtattcagggccagtctgacagcccgctgaccgccaaaggtgagcaacaggcgatgcaggtggcaacccgtgccaaagagcttggcattacgcatattatcagtagcgatttaggacgcacccggcgtacggcggaaatcatcgcccaggcctgcggctgtgacatcatctttgattctcgcctgcgtgaattaaacatgggtgtgctggaaaaaagacatatcgattctctgaccgaagaagaagagaactggcgtcggcagctggtcaatggcaccgttgacgggcgtattcctgaaggcgagtcaatgcaggagctcagcgatcgcgtcaatgcggcactggaatcttgccgggacttaccgcagggaagccgaccgctgctggtgagccatggtattgcactgggatgtctggtgagtacgattctcggattaccagcatgggcagagcgccgcttacgtctgcgtaactgttctatttcgcgcgtggattatcaggaaagcctgtggctggcgtctggctgggtcgttgaaaccgcaggggacatctcgcatctggacgcccctgcattagatgagctgcagcgttaacggcggataggaatcagcagttcacagcgcagattaattgggcgatctcccgctttggcgtcttctgccgggtagtatcgctcaatatcctgacctttacggcgcgtcaggttgagcattggcatgcacgttccgtataccgtcaggataaactcctgcacgccggttcccagaccttcataggtaaacatcacatattcgccgccctgcagcatcaccggatgccccgtcagtacatagccatctgcctgatcctgggctaacgcggtggtatagaatacctcttgttcgtcgtctttatcctgactcggacgcgtttcattcaggccgtagagcactggcggaatggtcggcgcgttgccgagaaaatcgtgccagaactgataacgcatttcatggcggaaatcagagatttgctccagcgaacaggagtagctctgggtaacaccaatcagcggcgtatcttccagggtgacaaatttgtgctctggcattgtgaattcacccagacgtagcggcgggcgaataccaaaggcgctccattcaggagaacggcggtaaagtgcaggagtctgggcaaactgcttcttgaatgcgcgggtaaatgtctgttgagagtcgaagcggtattgcagcgcgatgtccagaatcggacgcgcagtcaggcgtagtgcgaccgccgatttcgacaaacgacgagcacgaatatacgcgccaatagcatggccagtgacatctttaaacattctctgtaagtgccacttggaataacctgctttcgccgctacattgtcgagcgacaggggctgatccagatgaccttccagccagattaaaaggtcgcgaataatgccggcctgatccataaaatatcctcatcctttcaacaacgagcacctgacatcaggtaattggataatagcattttttgctgttttagcattcagtgtttttttcttagtagagtatgttttagggcttgacggaaataaaagtattgagattttgttcttaatcaatatgttatttaccgtgacgaactaattgctcgtgtaatagataaaaatggtaacaatatgaaatacaagcatttgatcctgtctttaagcctgataatgctggggccattggctcatgcagaagagattggttcggtcgacaccgtatttaaaatgatcggcccggatcacaaaattgttgtggaagcctttgacgatcccgatgtgaaaaatgtcacctgttatgtgagccgggcgaaaacaggtggtattaaagggggattgggtctggcggaagatacctccgatgcggctatttcttgtcagcaagtcgggccgattgaactgtcggatcgtattaaaaacggcaaagctcagggcgaggtagtattcaaaaaacgcacgtccctggtctttaagtcgttacaggtcgtgcgcttttatgacgccaaacgcaacgcgctcgcttatctggcttactccgacaaagttgtagaaggttcgccgaaaaacgcgattagcgcggttcctgtcatgccgtggcggcaataacagaggcgatttatgcaacgggaaacggtctggttagtggaagatgagcaagggatagccgacacgctggtctacatgttgcagcaggaaggttttgccgtcgaggtctttgagcgaggcttgccggtgctggataaagctcgccagcaggttcccgacgtcatgattctcgatgttggtttgcctgatatcagcggctttgaattgtgccgccagttactggcgctccatccggcgttacctgtactgttcctgacggcccgaagtgaagaggtcgatcgcctgcttgggctggaaattggcgctgacgactatgtggctaaaccgttttcaccccgcgaagtgtgcgccagggtgcgcaccttactgcgtcgggtgaagaagttctcgtcgccgtctcccgtcatccgtattggtcattttgaattgaatgaacccgcggcgcagatcagctggtttgacacgccattaacgctgacgcggtatgagtttttattgctgaagacgttactcaagtcgccaggccgcgtctggtcccgccagcaactaatggatagcgtgtgggaagatgcgcaggacacctacgatcgcaccgtcgatacccacattaaaacgttgcgtgccaagctgcgcgccatcaaccccgatctttctccgattaatactcatcgcggcatgggatatagcctgaggggcctgtaatgcgtatcggcatgcggttgctgctgggctattttttactggtggcggtggcggcctggttcgtactggctatttttgtcaaagaagttaaaccgggcgtgcgaagagcaacggaggggacgttaatcgataccgcaacgttgctggcggagctggcgcgtcccgatttgctctctggggacccaacgcatgggcaactggcgcaggcgtttaatcagctacaacatcgcccgtttcgcgccaatatcggtggcattaacaaagtgcgcaatgaatatcatgtctatatgaccgatgcgcagggcaaagtattgttcgattcggcaaataaagccgttgggcaggattattcgcgctggaatgacgtctggctaacgttgcgtggtcagtatggtgcgcgtagcacgttgcaaaatcctgccgatcccgaaagttcggtgatgtatgttgccgcgccgattatggacggctcgcggcttattggcgttttgagcgtaggcaaaccgaacgcggcgatggctccggtcattaaacgcagcgagcggcgaattttatgggccagcgccattttgttggggatcgcactggtgattggcgcaggcatggtttggtggatcaaccgctccattgcccggctcactcgctatgctgattccgtcactgacaataagcccgttcctcttcccgatctcggtagtagcgagctgcgtaaactcgcgcaggcgctggaaagtatgcgcgtgaagctggaagggaaaaactatattgagcagtatgtttatgcgttaacccatgagctaaaaagcccactggcggcgattcgtggcgcggcggaaattttacgcgaaggtccgccgcctgaagtagtggctcgttttactgacaacattctgacgcaaaatgcgcgaatgcaggcactggtggaaacgttactacgccaggcaagactggagaatcgtcaggaagtcgttttgactgctgttgatgtggcggcattattccgccgcgtcagcgaagcgcgcaccgtgcagttggcagaaaaaaacatcactctacatgttacgcccaccgaggttaatgttgctgctgaaccggcgttactggatcaggcgctggggaatttactggataacgccatcgattttacccccgagagcggtcgtataacgctaagcgccgaagtggatcaggaacacgtcacgcttaaggtgctggataccggtagtggtattcctgactacgcgctgtcacgtatttttgaacgcttttactctttgccgcgtgcaaatgggcaaaaaagcagcggtctggggttggcgttcgtcagtgaggtcgcccgtttgtttaacggcgaagtcacgctgcgcaacgtgcaggaaggtggcgtgctggcctcgcttcgacttcaccgtcacttcacatagcttcaaattcttcccacatagccttcgtatcctgctgccattgcaaaggagaagactatgttgaaatcctccctgttctggaaaatgaccaccctgtttggtgcagtattgctgttgttgattccgataatgctgattcggcaggtgattgtcgaacgtgccgattaccgtagcgatgtggaagatgcgattcgccaaagtaccagcgggccgcaaaaacttgttgggccgcttatcgctattcctgtgaccgagctttatacggtacaggaagaggataaaaccgtggagcggaaacgaagttttatccatttttggttacctgagtcattgatggttgatggcaatcagaacgtggaagaacgcaagatagggatttataccggtcaggtctggcacagtgatttaacgctaaaagccgatttcgatgtttcgcgtcttagcgaactcgacgcgccaaatatcacctttggcaagccatttattgtgattagcgtcggggatgcgcgtggtattggtgtggtgaaagcgcctgaagttaacggaacggcgctgaccattgaacccggcaccgggttagagcaaggcgggcagggcgtgcatatccctttacccgaaggggactggcggaagcagaacctgaagctgaatatggccctgaatttaagcggtaccggcgatctttctgtggtgcctgccgggcgtaatagcgaaatgaccttaaccagcaactggccgcatcccagttttttaggtgattttttgccagccaaacgggaagttagcgagtcaggttttcaggcgcaatggcaaagcagctggtttgctaataatctcggtgagcgttttgcttcaggcaatgataccggctgggaaaacttcctcgcgtttagcgtcgcagtgacgacgccagccgatcaataccaattaacggaccgggcgactaagtacgccattctgctgattgcactgacttttatggcgttctttgtttttgaaacgctcaccgcgcaacgtttacacccaatgcaatatttgctggtggggctttcattggtgatgttttatttgctcttgctggcgctttctgaacatatcggttttaccgtggcatggataatcgccagtctgattggggcgttaatgaacggtatttatttgcaggcggtattgaaaggctggcgcaatagcatgttgtttaccctcgcgctgttgttgctggatggagtgatgtggggactgctcaactctgtcgatagcgcgctgttgttgggaaccagtgtgctggtggtggcgctggccggcatgatgtttgtgactcgtaatatcgactggtatgcgttttcactgccgaaaatgaaagccagtaaagaagttacaacggacgatgaattacgtatctggaaataaggttgaaaaataaaaacggcgctaaaaagcgccgttttttttgacggtggtaaagccgattaatcttccagatcaccacagaagcgataaccttcaccgtggatggtggcgatgatttccggcgtatccggcgtagattcgaaatgtttacgaatacggcggatcgtcacgtctacagtacggtcgtgtggtttcagctcacggccggtcattttcttcagcagttcagcacgggactgaattttgcctgggttttcacagaagtgaagcatggcgcggaactcgctgcgcggcagcttgtactgctcgccatcagggccgatcaacgaacggctgttgatgtccagttcccaaccattgaacttgtagctttcaacgctacgacgttcttcgctgacagtacccagattcatggtacgggacagcaggttgcgtgcacgaatcgtcagttcacgcgggttgaacggtttggtgatgtagtcatctgcaccgatttcgaggccgagaattttatcgacttcgttgtcacggccagtcaggaacatcaacgcaacattcgcctgctcgcgcagttcacgcgctaacagaagaccgttcttacccggcagattgatatccatgatcaccaggttgatgtcatattcagagaggatctgatgcatttccgcgccatctgtcgcttcgaaaacatcatagccttccgcttcgaaaatacttttcaacgtgttgcgtgttaccaactcgtcttcaacgataagaatgtgcggggtctgcatgtttgctacctaaattgccaactaaatcgaaacaggaagtacaaaagtccctgacctgcctgatgcatgctgcaaattaacatgatcggcgtaacatgactaaagtacgtaattgcgttcttgatgcactttccatcaacgtcaacaacatcattagcttggtcgtgggtactttccctcaggacccgacagtgtcaaaaacggctgtcatcctaaccattttaacagcaacataacaggctaagaggggccggacacccaataaaactacgcttcgttgacatatatcaagttcaattgtagcacgttaacagtttgatgaaatcatcgtatctaaatgctagctttcgtcacattattttaataatccaactagttgcatcatacaactaataaacgtggtgaatccaattgtcgagatttattttttataaaattatcctaagtaaacagaaggatatgtagcattttttaacaattaaaccgttagtacagtcaggaaatagtttagccttttttaagctaagtaaagggctttttctgcgacttacgttaagaatttgtaaattcgcaccgcgtaataagttgacagtgatcaccctgttcgcggttatttggtcaagaagagtggcaatatgcgtataacgattatcctggtcgcacccgccagagcagaaaatattggggcagcggcgcgggcaatgaaaacgatgggttttagcgaactgcggattgtcgatagtcaggcacacctggagccagccacccgctgggtcgcacatggatctggtgatgttattgataatattaaagttttcccaacactggctgaatcgttacacgatgtcgatttcactgtcgccaccactgcgcgcagtcgggcgaaatatcattactacgccacgccagtagaactggtgccgctgttagaggaaaaatcttcatggatgagccatgccgcgctggtgtttggtcgcgaagattccgggctgactaacgaagagttagcgttggctgacgttcttactggtgtgccgatggtggcggattatccttcgctcaatctggggcaggcggtgatggtctattgctatcaattagcaacattaatacaacaaccggcgaaaagtgacacaacggcagaccaacatcaactgcaagctttacgcgaacgagtcatggcattgctgacgactctggcagtggcagatgacataaaactggtcgactggttacagcaacgcctggggcttttagagcaacgagacacggcaatgttgcaccgtttgctgcatgatattgaaaaaaatatcaccaaataaaaaacgccttagtaagtatttttc
